United States Patent Application Publication US 2026/0191916 A1 - sequence listing, part 91

SEQ ID NO: 607 - DNA, 2667790 bp, Luoshenia tenuis (residues 1,333,896-2,667,790 of 2,667,790)
  source 1..2667790: mol_type = genomic DNA
ccaatcgaaggcgaacttcccgccctccggacggcggccgtctgccgggtggaggatgccgtgaagcagctccagccgctctttcccgtccagcacatgggcggcggcccccatgaccttgaagcggttgagggtgtcggtctcgatacgggcgaaccgcgcccgcgccgccggaaggttctccgcctcgatggtcagggtcacatacttggttttcacatagccgttgctgccccgctcatactggaagcggagtatcccggccgcatcctcccggacagggtccaggtcgtccccctgggggtggatgccgaacaggtcctcctccggcccatgctccacataccggctgctgagcgacacctgcaccccgatggtggggtcgtagccgttgtagaaatcgcagaggtgttcaaaaatatcccgctggtcctccggcgaagccaggcggtagttgacgtcctcgaatgcaatcgtcttggagaaggccccgccctccagccggcacaggccgtccgggaacatattgcggaaggggatgctgtcctgcaccgtatgggttttcccgtcccccttggcctggcggatcaccgcctcgatctgcttacgctcggcgcgggtcagcttgcgccttgcccctgccggttttgcgggtcttgccgtttttgcctgcaatcgctctcacctcctgttccaattcgtactgccgcaccagggcggagtacaggttgttggtctggtagatccgcgtctttgggcggataaatttattctcaatgaggtgtcccaggaacacctccaggggctgcccgttcttctcgtacatggcgaacaggaagaagggaagcatcaccaggatcatgcacagggccgccgtagtggtgcccagcgcccccttggtcaaaaagaaaagcggcacgccaataattgctgccgctccgaaacagatcacctgccgtttggtcagcccgaacaggaccttgctctgtaccttgctcaggtccttcgggatcgttacataggccaatcaatgcacctcctttttcatgggagcatagtccttgaaatcttttaccgtgtggaaaatccgtttgttgttcacccaccgctgaagatggcgggtgatctttggagcggtgggacgctcgtagatcatcacataagggtcataccccagggcccgcagggtgttcacccggtagaggtcctgctcatgggtgctgccgtagttggtcagcacatagacccgccggttgcggtcgcttcggatggcggtatgcgccacaaagcgtttgaagtgctccgtcaggtcctcctccgggttgtcccaggcgaaatgcaccgccttggtccgcaccctgttcagcagggcaatgttgtccgggttcgtcagccggatgtccagcccctgggtgaagtccaccagcgcccggctggcggcaagctgttccagcagcgcctcatggtccgggcaggccagcaggttggggtccagcagtttgatctcatcctcaccgcgccaaaattcagacaggtcagcgactttgacgctcctgcgcccctccttgccgctgacgatgcaaaatccgcagttcctcggacagccccggctcaaaaagccgtaggccgttcccaaaaaccgcggatacaaaaagtagtccggccgaatgtgctcgatctcataagggaggtcttttccgcccggcccgtagccagtgccgccctggacgaccttctccgcgttgtttaccacgatggtgtccttggagtaggtgtccgtgaacacccggctcttgtaaaccaggtcatagcggcccttggggctccaccattccacccggtcgccccgcctggtatggtactcggagagcttcatcaggcagaggttgggaaagttgtgggagtccacgtctatcaatcctattttcattcagccaccccctttagtgcgccccgaacagggactttgcgaggctgccggtcttaaagagggtgaagcacagaagcaccgtataccccatgcacccccagatagcgccggaaatgttgtcgccgctgagcgaaataccttccaccagcaccgcatagatgcccacacagatcataatgaggaacgcctggaagcccagggccagcagggagcggagatagttctgccccgtgttgccccactcccggttcaccattgtggcaaaggggatgggacctatcgaagtgaccaaatacacctcaataatcctgccgtaaatgaccaggaagatgcagatggaaagtatctgcgtacacagtcccacgaagatgctctggaaccacagccccagcagggcgccgatgctccagtctgcaagctgggtctccagatcagcggtcacgctggatatgtcaatgcccgcatccgaaatgatgacgcctgccgactggttgaccacattctgcgccacatcgaacaccgccatgacaatgttccaggtgttcgtgacgatcagcaccgcgcagaaggttttgaaaatccacttaaagaaaatccatgtgtcgaaatcgtgaaggttgttcttctcgacgatgagctggatcagctcgtagcacatgacaaaggtgaggacgatgccggcgatgggaacgatcaccgtctccgagaggttgcggaccatgttgaaaatgccgctgttccatgcagcgggcgtcatgccgacctccccggcgatctcacccacctttgtgttcagggtatcaaacatcccggtcaggttggatatgataccatcaatgagcagttcttggaaccactcttgtattgcgtcaaagatcaacggggatcacctcctttgcgggggctcccgctataaagcaaaagcccccgccgggtttggagaaacatcaggtggtggacagcagatcggcaagcaggggaatcaacatcataccgatgagggcgacaccgccgccggccatcagctgcttgatgccctggctcttggaagcggggttgtcctggccgtaaccttccagaaggttgataccgccccacacgcacaggccgccgcccagggcgatgaccagagtctgcaaaacgtcgatagcactggtaaaaaagctcatattcacatttcctttcgttgtagaatcgttattgaaggtctgcggctgtcaattcgtacatctcgaaaggctcgtccggctttacgatggccggtctgcgcttcatgtaccgttccatatcaaagaggtacttcttgtcggcgtcggcagtatatttgtagtcgggatgtttggtcaggtcgtacttgtccgaaaggaacgggcgcacgccccgcagcatgaaaatacatttgcctccgtccattaccgccagttcgtcttgtgtcatcaactcctttcccaatttctgatagttgaggccgtgggagacctggctgccccggttctcggattgattgaagctgtcgatggtctccttgcccagcagctccgagatttctttcagggtggatttctccttgcctcccaaaaacaaggtgctgtcgcagttgcccacaatggtgtctgcggcgtccttgtagatggtctttaactgactttgtgactgcaaaataatagaagccgagatctcccggctccggatggtggcgatcagcttgtcaaagttgggtatctgcccgatgttggcgaactcgtccaggaggcaccgcacatggaccggcaggcggccgccgtagaagtcgtccgccttgtcgcacagaaggttgaaaagctgggagtacatgagcgccaccacaaaattgaaggtgctgtccgtgtcggagagaatgacgaacagtgccgatttccggtctcccagggtgtccagctccagttcgtcctccgccataaggtcccgcagttcctgaatgtcaaagggagagaggcgggcgccgcagctaatcaggatggatttcagagttttgccggcagccatcttgaatttgcggtattgcttcacggcgaaatgatccggctgctccttttccagcttggcaaacagcagatccaccggggactgaaactcctcgtcatcctctctggcctccgatgcgttgataaggtccagcagggtgatgaagttgcgctcctccggctccgcctcataccaaatgtagccgatgagggcagaatagtataaccgctcggctttgacccaaaaatcttcggaactcttttcgccctcacccttggtgttgagaatgagggcgttcaccagtttcaaaatgtccttttcgctgcggatatacgccaggggattgtatttcatggattttttgaaattgatgaggttcaggcttttgatgcggtattgcctgcgctccagcagggcgccgacctcctgtaagatggtgcccttcgggtccgtgaccacatacgaggaatggcattgaagcaggttgggcttgacgaaaaatcgggtcttgccgctgccggaaccgccgatgaccaggatgtttttgttccgggcgtacttgggctccttggggcggcttgacatggtgatccgctccgtttgggtgaggagaacattttgggagaagtccttatccacatagggagcgatgtcggccggtgtgccccaacgggcactcccgtactcgatgccgcggcggtatttcttggcgtttttgcccttggagtagaccgccagccgaatcagcaccgcgccggcggcgcccacacacaggtccagcagatggaaactgggcgccagacttgcgaaggccgctgaaaagccctgcccgatatggagcagcttctccgaggcgtcagccccaggagccagccgcacgccctggcagagcttgtcaaagagatacacaaagacgagatacggaagattgaggatgagctgctttttcagcttatcggtcatcgcgtcacctcccggtccttggtcttgaccttctcccgttcccgatgtttggtcttggactgttcctgagcctgggccagccgctcccggatggtggggcgcttctcccgatccagggtcatggcggtgaactccttgaaggccggctggagctggtccttatccttcgccttgaagaacacatagtaatgcggaggctccgtggtggggtcctttttcagggcatagtcgatgtcatactttttcgccaccacggaaaacgccttgatgttctgttcggtgatctcgatgttggtcagggaggccccatgctgcttgagctggtgcagggtctgtttcccctggtgaagggtgcgctgggagggcttcttctgcatctcctccagcaccttcttcacggccttttggagcaggtccgccgtcatcttgccggcctccaccgaaagggataccgtccgctgcgtgatttcttcctgcactcacatcacctccgttctccgctgccgtacatatcgtggctcaccagggaagtgtagtagctgtcaatggtggccggagcgttatacagggcagccagcagatatttcttgatgttgcggacataggtggtgttctcccgcatacggtccagcacatactcgatgtgggaactgttcagcttcaggaaccgggatttgactacctctgccggatagtcgtccccggcaatgcggatcatctcccggtgggagcagaccgtgtccaccatgagctccaccagttcatccagacggtcacagtccaggcgctcattctgtacgaggatgtcatactcgatgttctccaaaatcaattcccgatagctctctcgctcccgcatccaatcccgtccggccctatccgagcccctgggggtttgggggcttgataggataggatttgatccttccgtacttgataaatctttttttgatttatctttacttgattctttagtatttaattgtgcggggttttcctgttcaggttctcccaagacaggggaagcctgttcaggattatccaagactggattttcccgttcaggttttcccggtttaggttccggcggtctgggctgctccaggattgtgtactcgatggcgccgagctgaccgtttgcgttgcggacccgctggcggatcacatagccgtgttcctccagctcccgcaccccggcgcagatgctgtcaacgccatctttgcagatccgagccagccccttggtggtatagtcccattcctccggcaaggagagcatgagggagagcaggcccttcgctttcagcgagagcgacttgtcccgcaggtggtggttggacatcaccgtataatcacgggttttctcaatgcggaataccgccatattggatacctccttccttcggttttgaaaagtgttcgtttcggcggattttcgcccctgtatcaccaccccacctcccatgagggaaaggatataggtggcctcgcttgcgccgcccaaaggcgaaaaaacaggggatttctcacccgtattcatacagtttcatgcaccctcggcaaggcataaaaaacgccacaggtttgtgtaacctatggcgttccccggcagatgaccggtctgtattcagttgttcccttgaattttgaaaacttactccgcgctctcctccatccccagccaatcctcaaaggattttctggaaatgcggatcatattaccaattcggatcgtctggaactcgccggagtttgccagcttataagcagaggatttcccaatgccaagaatagcggctatgtcctctacggtgtaggtcctgtttttcggcgtctgcctttcgcccgatgcactcataatctgcctcctgtctttgtcggcgttttgcccatacctgcccggtatccctgacgggaaaggtcctcgcagacacactccctgctaagaatttgctaatttgactttctgaacgccccatcacaaggcggcattacagggatttttgtgcaggttgaccagtaaccaggcaatacaatttcagattaaacaataaggcaaattatgaagcggacgatgtacgaagcggcacaccatactcctaagcggaaggccttgggttcgaatcccgacaggtgcgccacatcgccgcagacttcactaagtttgcggcgatttttagtacaaactcacccctcacccgtaccgtcgcggcttaattttttctttacatcctcacgcatactagcattccctcatctgccatactaagaaaaacgcagagggagcagcgcatgagccattattttgagggacggtattataagcaccaaaaggacggccaaactttgtgcctgatcgccgggaaggcggatggcgggccgtttatccaggtcatcaccaacacgcatgtttggcaatacgatagcctcgccggttgccagattgacactaaagggatccgcctggatctccccccccagatcaaaggcgcggtgcgctacgggccctatacgccgctcaagggggacatcatggggccttttcagtacctgcccatgcagtgccgccatgaggtggtcagcatggggcatacgctggaaggcggctttctcgtcgacgggcggatgttggacctgtccggcggccggggctatattgagggcgaccggggccgttccttccccaacgcgtacctttggctgcactgcaacgacttttctcagcccctaagcatcatggcctcggtagccgacatcccttttgtgggcttccattttatgggttgcatctgcgccatccattacaaaggccgggagatccgcctggcgacctatcgcggcgttcacatccaccatgcggggcgggatgggctcaccctcgcccaggggcggtaccggctccgggtggatatcggggcgcatgctgcgctccccctcaaagcgccgcgcaaagggcaaatggtggataccatccacgagagcaactgtgccagcgcgcgctttcgcctttgggaaagcggtgcgctgctgttcgacctcgccagctgcaataccagctttgaatgtaccctttgatccttagggccgcaaaaccgcggcgatcgcccggtcaaagggtggatagagcacgcctttttcggtgatcagcgccgtaaccaactcattccccgttacatcaaaagcggggttatatgtctttgccccttccgctaccatgggtgcctggtaccacatctgcgcgatctccacgccctcccgttgctcgatcgggatctgcgcgccgtccgggcaggcggggtccagggtcgaggtgggggcgcaaacgtaaaaggggattccgtaatgctttgctgccagcgccaccgacagggtaccgatcttattggccacatccccgttggcggccacccggtcgcaacccaccaataccgcatctacccacccctgcgccattacgctggccgccatattgtcgcagatcaccgtaacatccacgcccgcatcggccagttcataagccgtcagccgggcgccctgcagcagcggccgtgtctcgtccgcaaagacccggaatccgtagccccgggcctgccctaagtagatgggcgccagcgccgtgccgcagcccgtggtagccagcgcgccggcattgcagtgggtcagcagccccatcccttttttcagcagcgtcagcccgttttgggcgatggaaaagcacacctgcctgtcctcccgatggatggcaagcgcctcctcctttaacgcctggcgcagcgcctgcggcggggcacccgcggtccgcgcccggtttagcgccccttccatccgttcaagcgcccaggtcaggtttacggccgtaggccgcgccccggccagataggcgctcatctcatataccttatcacaaaatttgtcagcatcgttttcctcaatattttttgaggcgacatatagaccataggccgccgccacgccgatggcgggcgcacctctcacctttaattgatagatcgcctgccaaaccgcctgcgccgtttttatagggatatactgccgctctcccggcaacagggtctgatccaggataaacaattcatcccgctcattgaggtacagcgtccccgcctcataaactgcatcaatttccattttgccctcccgtgatcaacccgtacatctgctcatggatcaggccgttggatgcgatcagcgaggtctcacatgtcgggtcggggctatttaaggcatagtccgtcacgcgcccgcccgcctgctctacaaggaagcggccggccgaaaaatcccaggcctgcagattctgctcaaacattccatccagcctgccgcaggccacataggccagatccagcgccgccgagcccgagcgcctgatctcatggcaatggtaaaacagcgcctccaacgccgcaaaattatcgtgggagcgggtgcggtcgtaggggttcgtcccaaagccgatcagcgcatccgctagcggacgggacgatacatggatcggcacgccatttaaaaatgcgcccttgcggttggctacgaacatttcctctaaataaggatcgtagacgatggccagggcatagcgccccgcctcgtgcatggaaagggagatcgcgctgtgcttcatgccatgcatcaggttactggtcccgtcgatgggatccagcacgaaaaagcagggcgctgtccgggcctttcccagcccgtcctcctcggcgatcaatatcccctccgggcatatctcctccagcgcctgggcgatcatccgctggacccgcaagtccaccgtggtcacgtaattttggctgccacccttttcaataacgtcaaaatccttttcaaactccaccatcgccctgcccgcctgagcgatcagcgcgatgatgcgcgcctctttatccatgctgaactccgcctttctccgccgcgtttgcggcagatgcaagcgcgcttctgccgccggtgaatcccgcttcattctagcatcggcccgccgcaaattcaaccgctacgggcttccttcccgctgctttttataatatactgctttaggatcgcaaggttaaaatccaaaggagtaacggtatgaaaaaaaagctgctatctttgctgctgtcgatcagtatgttattttccctctccggcattgcactcgccgcgcctgaggaggggaacgcgcaaaccaccgtcaagatcgtgcacaccaacgacctgcacggttactatacggccaccagccgcggacagatcggtttttccgcgctcaaggccgtgatcgaccgggaacagcccgccctggtgttggacgcgggggataccttccacgggcaggcctttgccaccgtggaaaagggggcttccatcgcccagctgatggctgccgtggggtatgatgccaccacgcccggcaaccacgattggagctatggcaaagaccagctcaaggccctgggacaggggcgaagctttaagatactggccgctaatgtggtaacggacagcgccagcgccttttttgatacgccctatctggtcaaagacgtggtagccagcgacaacaccccgctgcggataggggttttcggggtgatcgacgatgcgttttacacctccactccgccgacccatgtcgccgggctccaatttctgcccgaggcggataaagccaacgaggtcgccctgattctgcgagatgtggaaaactgcgatatcgtgatcgccttaacccatcaggcggatctgcccggctttgtctccgccctgcacggggtggacgcggttatcgccgggcacgagcatctactcatcaattcggtctatctggatgccgacggccgagaggtgcccgttgtagaagccggatactattttcaaaacatcggcgtattgaccctggcgtttgaccccgcttccggccgggtagatgccggcgctaccaccgcgcgcttcttatccgccagcgaggtcaccggcctgtcggatccgacggtcgatcaaaccatttcttcgatcgttgggctacaggagccgctgctaaatcgggaaatcggtcaaagcacccgcgccctcccctattcctgggaggaacttcgggtgagcgagcagggcatcggccgcttggtcaccaatgcttaccgcaacgttaccggggccgacgtggccatcgaaaacgccggcggcatccgcgcgggccttccggaggggcagatcgtctataaggatatgatcagcatctcgccttacggaaataccctggttgtgcggcggctgaccgggcagcagcttctaaacgtgctggaacacgccatcgatatcggcatccagtgcgatgcggtttacacgctccaaaaacaggccgtcgccaatggggaggatccttatcaatacgcctggccggaaaacagcggcagttatctgcaatttagcggcatcagcgccacttacgatgttacccgcccggccggcagccgggtcatacaggcccagatcggcggcgcgccgctggacccggcgcgcacctactcggtcgccactaacagctacgtcattgcggatgcggaatatccggacatcgtatcggcgcccacccaatacgaaatctccacctgcgaggaagcgctgatcaaattcatccagaccggcgattttgaaaagggacttgacgtccccggcctggtcgccttggttccagagccggcgcagcccacccccagcgcaacggtaacgcccgcccccacagagagcgcgcaggcctctcccgcgtcctccggcgcagcatcccccagcgcagcgcccaccgcccagccgtcgcccgcgccctccggcgtttccagtccggataccggggacgatgcgcagatctatcccctgctggctttgatgctggccgcattggtagccgccaacatcgtattggcgatccgccagcgcacccgcgccaaagaaaatacccggcggtgacgccttaaatctatccctaggccctgacgaaagtcagggcctttttattgcacggccaggttaccccgccaattgtcccattggatatttttctaaccccttcgctgcacggcgtacggatatgcctggaaggatgaaccaaatatccctttgccacgtatactgaaagtatcctgacgaaaaaggaggtttggatgaatgaaaatcagcagttggcgcacgctggcggccctagtgctagccttaagctgcctggtcgtgctgaccgttcctgcgctggccttcggcccggccgatgagcgcatctatgccggcattgacgtgagcaagtggcagggcgagatcgactttgccgccgtggccggcgacggcatcgaggtggtctatatccgctccagcgtgggttctagttatgtcgacccttactttgagcgcaattatgcgcaagccaaggccaacggcctgaaggtgggcttttatcactatgtcaacgcccgcagcgtggaggaggcccggcaggaggcccaattttttgccgccacggtgcggggcaagcagcccgagtgccgcctggtcatggattttgagtactttggcagcctcacagtcgatcagatcaacgccatctcccgcgcgtttttagaaacgctgcagcaggccagcggcaaggaggtcgccatctacagcaacagctatcaagccgcgaatgtgtttgcggccgatctggccgtttaccccctttgggtggcggagtatggcgtttccgcccctgcggcaaacggcaaatggtcgagctgggccggtttccagtacaccagcaccggccgcgtttccggcatcagcggcaacgtggaccgggatcagtttacccaggccatgttcatgagcggggatacgccctgttcctcctgcgagccgtaccagctttatacggtgcgccggggcgatacccttagcgccatcgcccagcggtttgataccaccgtctccgcgctggtgcagctcaacggcatcgctaatcccaacctgatctataccgggcaggtgctcaaggtgcccggtacgccgcagactacggtgcagacctataccgtgcgccagggggatacgctttggggcattgcccggcgctttggcaccaccgtgcagtatctggcgggcgtcaaccatatcgcagatcccagtctgatctatcccggacaggtgctggatatccacgtagagcaaggcggcgcttcgggcagctacacggtgcgcgcgggcgatacgctttggggcatagctcagcgctttggcaccagtgtttctcatctggtcgccctcaatggcatcgccaaccccagtttgatctatcccgggcaggtcatcaaactatagcgttaaaaagccgggcagctaggctgcccggctttttttacttttctctttatccctggcggatattgtaaagcgcgttgagcagcacccagttttgtacaaacgggcgcatcaagttccagtatgacgctccctgtaacccgtattcgggtatcaatgccaatttggcgcggatgctgcgggcatcctcaaaccagacctcgtgctgggtaccctcatcatagtaattaaaatagggcgtctgggcgatagggtcaaacatgatttcagcccctttatgctgcgccagcgctaccgcctgttggttgcccagcgcccgcgcgcgtgactggcccgctacatagggcagcgtccagtcataggcgtagttgggcacgcctaaaaagatcttctccgccgggatacgggtcagcgcgtattcaaccacctgccgcacgctgtttagcggcgctacggccatgggttcgctataggtatagccccattcataggtcatcagcagcacattattagccgcctgccccaggccctgataatcaatcccctcgtaaagcagcccctcctggtcgtccgagagtttgggcgctaatgcaacggtgaccgtgtagccccgcgggttgagccggtcggccaaagcttgtataaaatccacatacttttgccggtccgccgcggcgacggattcaaaatccacgtccaccccgccatacccctcttccaccagggtctccaagatctcctcaatcaacctgcggacggccaccgggtcgttcaatagctgactggccaggtcagtgctaaatcgctcatcctcgtccagattggatacgtgcaagatcggcactacgccccattgcttggccagggcgatcagcctttcatcttcaatatcatccagttcgccatccgcctgggcgctgtaactaaacggcgtcagatacgtcaggtaaggcagcacctggtgcagcgtggccggctcgataaacggataggcatacccgtttacagccatctcgccctgcggcgcatccgcgtattcgatcaccaactcctgtccaggaaagatccggttccatccgcccaattcaatattgttgcggtaaagctgattgacgctgatgccgtaatccgacgcgatacgccaaagcgtatcgcccgcgacgaccttgtgcactactttgggatactggatcaccagggcctgccctacagccagccgcacgggaaactccagcccgttttccaccgttaatctatatgacgaaacgccgtattgctgcgcgatgctctgtacgctctcccccggctgtacggtatggatcaccatcggtattccccccttaatttttactttagtatataaacgccgcgctggaaaaagaatgaaatttgcaaaaagggcttgcactttttgcatatcgcagttatactgtgcatatcgtttatatacagtatataaggagatcgcatggatatcataatcagcaatgccagcgataagcccatttacgagcagatcaccgcgcagttcaaggccatgatcttgggcggcgaactgcgggagggcgccgccctgcccagcatgcgtctgctcgccaaagaactgcgcatcagcgtgatcaccaccaaacgagcttatgcggatctggagcgggacggctttatcgaaaccgtgcccggcaaaggctgctttgtagccggtaaaaatacggattttatccgcgaggagcatttgcgccaggtcgaagcacacctgcaacaggcggtagatgcagccaagcgctgcgcgctgccctgtgacgagctggtggaaattttgcaggtactctacaaaggagatgaataaaatggaaatggcgctggaggtgaaaaacctcaacaaggcctatcccggcttcgcgcttaaagatctgtctttctcgctgccctgcggcagtatcatgggcctgatcggggagaacggcgcggggaagaccacgatcctcaaggctattttgaatttgatccatcgcgacagcggcgagatcacgctgctgggccatagggacggcgggctggacaacgctatcaaggcgcagatcggggtggtgtttgatgaaagctgctttcacgataatttaacgcttcgccatatctccaccgttatgggcggcatctaccccaactgggatcccgcctattttacccgcttgactcgccagctttccctccccgagggtaagccggtcaaggcgctttccaaggggatgaagaccaagctgtgcattgccgctgcactggcgcaccgtcccaggctgttgctgctggatgaacccaccagcggcctggaccccatcgtgcgggaggagattctggatctttttatggattttattcaggacgagcgcaacgcgatcctgctttcctctcacatcaccagcgatttggacaagatcgccgactatgtcacctttatccacgaagggcaggtcgccctgagcgataataaagacgagttgaccggcaagatgggcatcctcaaatgcagcgagcaggcgctgcccacactggatcgcagccaggcgctgcgcttgcgcaaagggcagttcagctgcgaggtgctggtgcgggataaaaacgcctatcgcatccatcaccccggcgccgtggtcgagcctgccacgctggaagatatcatgttgttttacgtaagggggcgcacgctttgaagggtttgattgccaaagatttcttaaatctcaaacgctatagctttaccctgatcctgattttactgctctacggggctatttttctccccatggagaacggcggcttcgccgcggtggccaccgtgctgtgcaccatgatggtcatcaccaccttaagctacgacgaaatggccaaatgggataaatacgttttgaccatgcctatcacccgccagcagctggttttggggaaatacgccgtcatgctgatcctggccgcgttgggctgcctggtgggctgcgttgctatcgggatccagggtatcatccgcggccagtgggaccccggcgcgctgtttatgcaagcgggcctgttttgcagcgcttccctggtcttgggcagtattttgctgccgctgctctataagttcggcgcggaaaaagggcggctgctgttgctggccgtagtcctgatccccaccgttctatccctgggctggcgctatatcggcgaggcgttggggctgcccgcgccggatctcgccgcgctggaccgctggtttcagatcgccctgccgctgctgcccttagccgtactggcgatcgtagcgctctcttacgccctatccgtacgaatcatgagcaaaaaagaattttaattcgcctattgatatataaaaagaccgctgcgttttgcagcggtctttttatcgcttttggttagatgcgggccacgccgctttcgcgggcggctttggcaacggcctcggccacaaactggcctacgcgcttatccagcgcatccggcaggatgtactcctcgttcaatttgtcgtccggcaccaggttggccagcgcctcggcggcggccaccttcatcgcctcgttgatctcggaagcgcggcaatccagcgcaccgcggaagatgcccgggaaggccagcacattgttgatctggttggggaaatcgctgcggcccgtgcccacgatgcgcgcgccggcggccttggcctcgtccggcatgatctcgggcgtgggattggccatcgccagtacaatcgcatccttgttcatggtacgcaccatatccggggtcagcacgcccggtgcggaaacgcccaggaacacgtcggcaccattgacggcatctgccagggagccctgttttttctccaggttggtgatcttggccatttcctgcttggcagggtccatgccctcgcggccttcatagatcaggcccttgcggtcgcacatagctacgctcttgatgcccaggctgagcagcagcttggcaatggcgttacccgcggcgcccgcgccgtttaagaccaccttgatctcctctttcttcttacccgtcaggcgcagcgcgttgatcatcgccgcggccacgacgatagccgtcccgtgctggtcatcgtggaaaatcgggatgtcgcacagctctttcaagcggctttcgatttcaaagcagcggggcgcggcaatatcctccaggttgatgccgccaaaactgccggaaatcatataaatggtgttgacgatctcgtccacatccttggagcgcacgcacagcgggaaggcatccacatccgcaaactccttaaacagcgcgcatttgccctccataaccggcataccggcctccgggccgatgtcgcccaggcccagtacagcggtaccatcggtaataacggccaccaggttgctgcggcgggtcagctcaaaggatttgtcataatcgtcatggatgaccatgcagggctcggcaacaccgggggtgtaggccagggccagctcctcacgggtgttgatggaagcacgggaaacgacttcgatcttgcccttccactcataatgctttttcagcgactcttcacggatattcatattgtcctcctcttatgaaatcgaatctttcttagtcctcaaaggggaatttatactgcgtcaggcccagctcgtcgcgcacggcgatgaactccttctgtacagactcgttgatgggcacgccgtccttgcgggccagacggatctcgtattccttctcgccggcggtgtagatgcgctccgcacccggggcttttttagcgctgcgcacttcgcggatgatgtcgcccgccttcttgcggcaaacatcctcacccatgaagtggtcggtatcgatggcgataaagaagtggcccagatggaaggggcgcttctcgccgttttcgcccttgccgatcagcgctttgccatagctgccatcctgcagcaccgcggaaaggaactctacaaacatcgcaaagccgtagcctttgtagccgcccaaatcttcgccgatgccgcccagcgtggtcaacgccgcattgccgctgccgatagccttaagcgccgcgcccgcatcgccttcaatggccttgccatccgcgcccactaccgtaccggcgtgcagattctcgccgatgcgctcgtagtactccagcttgccgttctgggtgatggaggtagccgcgtcaaagttgaagtcaaacgcctcatccgtgggcacgcccagggtaagggggttggtgccgaacataccctctacgccaaaggtcggcgcaacggtaggccgggcattggtgccggtcaggccgatgcagccctgtttagccgccatggtggtgtagtagccggcgatgccatagtggcaggagttgcgcacaaccaccatgcccatgccgtactttttagccttatcaatcgccaactgcatggatttatagccgatgacctggcccatgccgtcatgcccgtccaccacagcggtggtctcggtctcttttacgatctcgtaattggtcacggggttttggatgcccgccttgatgcggtccagatagatgggcttaaagcggttgcacccatgggactcgatgccgcgcttgtcgctctccagcagcacgtccgcgcagattttcgcgtcctcctccgggatgccgtagcctttaaaagcgtctactacgaaattggtaatcgtggtccaatcgacgatgttggttttagccatgatccattttcccctttcttcattgcctttaacgaatcgattgacggtagaaacctgcggcgctataggcgcaaaaaaagagtaaaagtactttacgtgtatagcaaacacgcccatacctttactcttcatctctaaaggtttctacatctttaatctagcatatttttatccagttggcaagacggccaagcctaaaagatatcgcttaatgccaggcaggcacccgccaggttgatcatccaggccaccaccgagatcaccaaaaagatgatactcagcaccaagcctgccaccgcccgcccccgggcggaagagcgcatgcccggcaccgcgctgacgatgccgatgatcgaggtagccagtccgcccaaagggatcagccacgtcacgatggagaccagccccatcaccagcgaaagggtggccttgttcaccgggtcgtgcatcttgggcggcacaggctgtgccgcttccgctgcagccggttcgctttgcactgcgggcgcagcgtccgtatcagccctacgctccgccgtatttattgacgcggataccgcgggactatctggttgcgtcactgctgtggccgcctcgctttgcgctgcgggcgcagcgctatcggccagacttttcaccgcgtctttaggcttggattgcactgccccctctgcctgttccgccgctgccggccgcgcgggtatttgctccgctccaccctggccaccgggctgctgcaacaacgcgatcaaggcttccacccgtccgcgaagcatctgctttaccgcaaagccccagaagccgttcagccccatctcgccgcaatacaccccgggcaggatagcaaacttaagccaagcctcgatctgcacgccgccctgccggcaggtggtcttgacgaactggggcgccgtcatcagccccacgccctttttccacacccgctcgcccttataatcggtgagcacaaaaccctctttgtcaaaaaagtcccgtatgatccgctccgccgtctccgccggccagctgatcgtcacatcgttttgatagcgcttacccatagcccggtttccgcctcctttttagtcccttacgcttcctatattataatatgttttcaggcactatgccctttgcgcaaggatttccgtgattgcacgcagcaccttttccatctcttcctccgtgccgatggtaatgcgcaggtaattgtcgatcctagctttcgtgaaacggcgcactaggatgccccgctctcgcagcgcggcaaacatctcctggccgcttaccccatccggcggcgcggcaaacacaaaattcgcccgggaaggcagcaccgtaaatcccatcgccccgatggcggcggcaaaccgctcccgggtggccatgactttaagcgtctgctccttggtataggcctcatcctcaatagctgcctgagcaccggccagcgccagccggtccaatggataggagttaaacgaatccttcacccgcgtcagcccttcgatcagatgcgcctgccccagggcgtatccgccccgcaggcccgccagcgcgtgtgatttgcttaaggtggtgatcaccagcagatttggataatcccgaatatagggcaccatggactcggcgccgaacatcacgtacgcctcatccaccaccaccacgcggtccgggtccgcctccaggatgcgcaggatatcctgcgccgccagcgcctgggccgtgggcgcattggggttggggaagatcaccccgccggaaggctgcaggtagtcctccacccggatgcaaagcccctcgtccagcggcacctcccggtaggggatgccaaacagcccgcaaaacaccggataaaagctataggtgatgtccgggaaaagcagcgtccgcgagggatcaaaaaacgcctgaaaggccagcgccaacacctcgtccgatccgttgccggcaaaaacctcctctatccccagcccatgccgctgcgcgatcgcccggcgcagcttaagcgcctccgggtcgggatagagcctaagtccatcgcccgccgccgcatgaatagcctccagcgcccgcggagacggaggataaggattctcattggtattcaatttaatgtactgccggtcctgcggctgttcccccggaacatacggttccaagcgctgcgttacggcgctccatagcttttccatcacattccaccctctatcctttcggtatccgcagcttatccatgtgccgccgcggcccttacatcttgtattttatcacattagcgtgcaaaagtatagggggttcccttaagggcgattatggcgcttatctagggtttggttacaacctgtagcggaaatttctattatatagaagtcacgcccccttttccttgacaatcctttaacagaaaagatataataggggcggtaaagatgccggtaaagccgatccggggtggatggcgcattgccgtggctttgccgcgtttgtttatttatatcctaccaaacgtataatttttaaggaggtttcctacatggctaagaaaattaccattgatgggaataccgccgccgcccatgtggcgtatgcattttcggatgtagcggcgatttatcccatcacgccttcgtccaccatggctgaagtgtgtgacgactgggctgcccatggccgtaagaatattttcggtcagacgctgaagatcagcgagatgcagtctgaggccggtgccgccggtgccgtacacggctctttggccgccggtgccctgaccaccaccttcaccgcttcccagggcctgctgctgatgatccccaatatgtataagatcgctggcgagcttttgccctgcgttttccacgtaagcgcccgcgccctggctgcgcacgcgctgtctatcttcggcgaccatcaggacgttatgtccacccgtgccaccggttttgcgatgctggcttccgcttccgtacaggaggttatggacctggctaccgtagcgcacctggccacgctgaaggcttccgtgccctttgtacacttctttgatggtttccgtacctctcacgaagtgtccaagatcgaggatatcgattatgaagatctggccaagctggtggattatgatgccatcaaagccttccgtcagcgcggcttgaatcctgagcacccgcatcagcagggtaccgctcagaacccggacatctacttccagaaccgcgaggcggccaacaagtactatcaggctgttcccgagatcgtggaagaggaaatgaaaaaggtttccgcccttaccggccgtgaataccacctgtttgattatgtgggcgcgcccgatgctgaccgcgtggtcatcatcatgggttccggctgcgatgttgccgaagaggctgtcaattacctcgtaggcaaaggcgagaaggttggcgtgctgaaagttcgcctgtatcgtcccttctcggccaaacacttcattgccgccctgcccaagagcgttaagaagatcgccgtgatggaccgcaccaaagaggccggttctctgggcgagccgctgtatcaggatgtttgcaccgtgctctctgagaacggcatgaatgatatccaggtatttggcggccgttacggcctgggctccaaggagttcacgccttccatggtcaaagtggttctggacaacctggccgctgcccagcccaagaacaacttcaccgtgggcatcaacgatgatgtgacgttcacctccctgccggagggcgagctgatcgacaccgtaccggaaggcaccttctcgggtatgttctacggcctgggttctgatggtaccgtcggcgccaacaagaactccatcaagatcatcggcgaccacaccgatatgttcgctcagggctatttcgtgtatgactccaaaaagtccggcggcatcacgatctcgcacctgcgctttggtcataagcccatccagtccgcctatctgatcgatcaggctgactttgtggcttgccataacccgtcctatgtgacgcgttataacatgctttcttccctcaaggacggcggcacgttcctgctcaacagcccctggtctcctgaggagatggacgagcagctgcccgcttccatgaagaatgccatcgccaaaaagcacttgaagttctacaccatcgacgcgatcaagatcgccggcgaggtgggcatgggtggccgcatcaacaccatcatgcaggccgcgttcttcaagatttcgaacgtaatcccctacgagcaggctgaggattacatgaagcaggccgttaagaagtcctacggccgcaagggcgataagatcgtcaacatgaactatgccgctatcgataacgctatcagcggtctggtcgaggtgaaggtgcccgagtcctgggctaccaccaccgagggcgccgttcccgtcaaggtgcaggctcccgattacttcaacgaggtcatccatccgatcctggcgcaggaaggcgacaagctgccggtttccaccttctctgctgatggccgcgttcccaccggaaccactaagtacgaaaaacgcggtatcgccgtgaacgtacctaagtggatccccgagaactgcattcagtgcaaccagtgctcgctggtctgcccgcacgctgcgatccgtccggtcatcgctaaggctgaggatctgaatggtgcgccggaaggttatacgcataagaaagccatcggcaagggcttagagggcatggagttccgcatgcaggtctatccgctggattgcaccggctgcggcaactgcgcggatgtttgcccgtccaagcagaaagccctggtcatgacgccgctggcggaagtagaacccatcgagagccccaacctggccttctccgagaagctgcccaaggtcgaggtaccggtgagcaaggctaccgttaagggcagccagttcctccagccgctgtttgagttctccggcgcctgcgctggctgcggcgagacgccttatgtcaagctggtttctcagctgtttggcgatcgcatggtcgttgccaacgcgacgggttgttcctccatctatggcggttccgccccgacctgcccgtataccaccaacgaaaagggccagggtcccgcttgggccaacagcctgttcgaggataatgcggagttcggcttcggcatgaacctggcgttcaatcagcgccgcgccaaactggccgacatgatggttgacgctatggagggcgcgccggaagatctaaaggccgcctatcaggcttggctggacggcaaggatgacgccgacgcttccaaggttgctgctgccacgctgaacgagttgctgcccaagtacgccgataagtgcgagaaggctgccgccatcctggcgcagagcgatctgttcgttaagaaatccgtctggatcttcggtggcgacggttgggcttacgacatcggctacggcggattggatcacgtgctggcccagggcgaggatgtgaacatcctggttctggataccgaggtgtattccaacaccggcggtcaggcctccaagtccacgcctaccggttccatcgccaagttcgctgccgccggcaagcgcacccgtaaaaaggatctgggcatgatggccatgagctacggctatgtgtacgtagctacggttgccatgagcgctaacccgaatcagctgatcaaggctatgaccgaggcggaagcttatcatggcccgtccctgatcattgcttatgcgccgtgcatcaaccacggtattaacatgagcaaatctcaggcggagatcaaaaaggcggttgaggccggttactggccgttgtatcgcttcaatccggagctggaggagcagggcaagaacccgttctctctggattccaaggagcccacgggcgacttccagggcttcctggccggcgagatccgctatgcttccttgaagaagcagttccccgaggttgccgacgagctgttcgagaagaccgaggcggatgccaaggcccgtttggatagctacaagcgcctggctgcggaataaaacctaacccatataaaaagagagcaagatttttctgctctcttttttcttttgcgcagctatggaatattcatggaatgccgcgctcgcgtgcttccctgctgttgaaaagcacctgaatacggacggtatcaacttatccccaggcctctataaaagaatacacaataaaaaaggctagccgatcaatccttcggccagcctttcttatatcttttatggagcggtaactatttggccgctttctttctgccgtacagcacggtgcccgcaatacccaaaccgctcagaagcaggagtgccgcccataccatcatgatgttcggctcgcccgtcttcggggttgcagtttctgttgcggcaccatccgtggtctccgcctcgggggtaggcgtagcttccgcaggctttacgctaggatcgaccgcgccacatgcgctacacttgccatctacgtagttatgcggcagtttttcgattaccgtacccttttccagtacctcgccgcaacccttgcagaccttgtcccctgtgtatccctcttcggtacaggtcgcctctttcgcgttgatgatttccgtttcaacatggcccgttacgggaatcgcagcggtttccttgtatccgcatacgcaggcacgctccttcgtcccctcctgcgtttccgttggcgcttttaattctgtccattcaccaaagctatggcttgcagttgcctcttggatactgccctctttatccgggcagtcggcatcttggcattcctgccagtgctggttttcgtcgtactgataagcaccatagttatgcaaaagcggcatatccacatccattacgatgcttctcccgttgtcgccgccatcccgaatcgccacgggcgttactgtctggccgttgacccgcacggtcacattctctttttgaatattgtttacatcaaaactgtagccgctgttggtccaaatatataggtacagctgataggcagtgtgcgcctgcagcggatcggttacctgaacatcatggtcgctgactacgcctttatagatgagtttcgcattctgtacgaataccttctcggaatccgccgttacattgctctcggcccatgtattccctacgaccagattcttgacgttaagcgctagcgtatccacttgctcacttaacgcatccatgaaaaagagaatttttatgcttccatcggtatctgtacccatgacccaggcatacgcgggtgcctttccattgaccgttacgatgctcttaatattgtcatctgtaagagcgggtaacgcataaccatcttctgcttgcagggtgacgtagtggcagtaaagttttcccctttcaaagttcccggcaacttcattatactggccatccagccagcccccaacagcagttacggtaacgccctgcgtagtcgtcgtaatgttagcatctgccatcggctggccgatcccataaccgcttacggacagggaaaccgccgctatgggctccgccgcggctgcggccattggaaccaatccaagcgttagagcgcaacacagtaaaacaaccagcagccttcttgcctttttcataagaaatacccctttcttttctcctcgaaaggggcggcttgctactactattccccctccccgaggacatgatgtacctttcctcagaggtgtttcctatacattaaaaatgttacgcccttccggtcgtatttgcaacatgttttttagttcttttttcctaatatataaactgctttaacatccctattcacccaaacgttatcatccttcctaagtccgttttataaccggggatcgttcagctaaaacgcaaaaaccgcacaggtctttacagcctgcgcggcatttgccaaaataaacgtttgttatttttatctaagcggatcgttccgctatcctttcagttggtaaaccgtcccctgtgcagcgcccgtaaagcgtacacgggtaaaaggcgttttggggaacacctgcgcgctcatcacctggcggccgccatcaaaaaacgcctccaccgtctgcgtatcgaagatcagccgcatcgtcaattcctcgtcctcagtcagccgcttacagaccaaacgcggataaaaatgcggcgaaaaggctacctgccccgcgcgggaccggtcgacatagtactggccatcctcatccagccccaccgccagacaatctccgctgtcgttctcaaaccggcaggcatagggcgtatcgctgtttaatgtgatctcaaaacattcgccaggcagggccaccgctctttccctctcgggcagggtatcaaatgtgataaacggaccccggaagcgctttagctcttctatcggccgctgtgccagcaccaggcgccccttggctctggccagccgcagctcccttggtacgcacatcgtcccacggtatggcccggtgggcgtcttgtccgcataggcccagttgctttgccatgccatcatgatccgccgcccgctgggcgcctggttgtaggtcacgccggcatagcagtccgccccctcgtccagccagatcgatgcctgaagctgcggatcggccacaaattgtccttccgaaaaatcgccgatcaaatacagcgtgcgcgagccgccttgcgccggcgccatcgaaatactacatagcaaaatccagcacgccttgccgtccggcgccatcagcggaaacacgtccgggcattccaacacgccggaggggacggttcccggccggagtatctccccggtcttttcccatccgcgcaggttttccgattgataaaagcagatccggtcccctgccgccagcgccatccgccaaagcgtttcgccctctacgcggaatactttagggtcccgaaaatctggaatcccgggattttctaagatcggattcccgggatagggcctaaaaaagatcccgtcacttgaccagtacaacccctgctgctccacgctgccgtgctgcgtatagcaaagcaccatcgggtcgcgtccgctgcccaggtgcgaggtattccccacatccaccaccgcgctgcccgaaaaggccatgccctggtcgttcggcttcagggccactggcaggtggcgccaacgcagcagatcccggctgatggcatgaccccagtgcatcggtccccatagcgtactgcggggatggtgctggtaaaaaaggtgataccagccatcccggtacaccagcccattggggtcgttgatccacccctttttggcagtaaaatgtagcttgggtcggtatgttgccatatggcccttcctccctctttacttccccgggaactgtgcggccgcccgctccagcgtaccacccgtcagacggtgtaccgtccactcatccatggtacgcgcatccagcgtctggtagaattgcagcgaaggcgtattccaattcaggcaggtccactccatacgcgcgcaatcccgctctacagccaactgcgccaggaagcataaaagcgccttgccgtatcctttgccgcggtattccggcaacacgaaaaggtcctccagataaaggcccggcttgcccgtaaaggtcgaaaagttctcaaaaaacacggcaaaacccaccacggtatccccttcataggccaatatcgcctctgcggcgtggcgcacaaacagggattggtgcagtatttcccgcgtcacctgaacctgatcgctcatcttttcataatctgcgatgtgtttgataaaatccaaaacggtatccacgtcttgctcggtcgcaaaccgcagatagaaatccggcagcttcgtttcaatgcgtgtacccacctttatcctcacctcattaaaacccaaaatcatatcttaataaaattcgctctatgggagcgaatcccttttaaatcccctcaattttcgcaaaaaaaggccggcaatgctgccggcctcatggttcggttcgttatcatccttgagtttggtgatccttggccgttacgcaggccaaatgctgttcagcgcttccatcgtcaggtccagttttgcgtcgttatcctccatcgccttgagcttcgggctgaagggttctaccgccaccggcccttcgtagccaatcttgaccagcgcatccataaaggtatcgatgtccagtaccccggtctcccgcggcatagcgcgagggttatccggctgctcagccaacgtataaccgtccaccgcgtcgttgacgtgcaccagcacgatctgctcctttttcagcccgtacacatccttcatatcgtgcccagcggtatagcaatggtggcaatccagcaacaacccgcagttcccggttccgatcgcgtcgcacagctccagcatctgcgggatattataaatgaagggattgggatgggtatccctggctttttgcacgcccacaaactccagacccagggcaatgccaaactccttgaggatcgccgcataccgccccaggcgctccaccataaaatcaaaatgctgctgataggtcatcgtttcatgccagggcgtgatccaggtatagcatcccttcccgccaaggcgtgcagccgtttccgccatggtcttgagctgctcggcccccgcttcaaattccgccttgtccgcagccttataagccagcggcagcgcaaacccagcgttattcaacccccattgcgccagcgcatcccgcactttgtcctcaccaatcagcgcggccccgtccggcggcacctcaatgccctgaaagccgtggcgccccgccagggcgatcccctctaaaagcggcacatctacgtttacacagcctaagacaactgatttatacataggcatttaactcctttattcaagttgactattcgtggttaaatacgtattccgtgtagcccgtggtgatgcccgaggccaaggccgccggccgctcgcaggtgctttgcaggtgatagtaccgctctgtttcgccggattcgatcatgccgaaagaagcctccaagaagtgataagccatcgaggcgtccgtgcgcgctttgcgcccgttgcggatcgcataggcaaactccgccacgccgatgccccgcatgttcgggtccgtataggcatgggtatgctgcaccacataaggctcgcggtaccctacccgggtcaccttcacatcgccaccaaagcagttggggtccgggcaggtcaaaatgccttcggagccgtagatctccaactgcggggtctccgagaagcactccgtcgtagtcatgatcgtgcctagcacgccgctttcaaattccagcgcgccgatggtattggtgggcgattgggtcttaacctggtcgccatattcaggatggtggggattgacatagggcttttccttgatattggtctgcgcaaagcccgccacgcggcggatgggccctaaaagattgatgaggttgacaagataatagcatcctacatcaaatataataccaccgccgggataagaagggaatgggaacttaggctcggcgccgcccaaaacgtacgagccgcggatcagcgtagcccgggccatgatgggtttgccgatgatccccgcgtccagcaggtgccgggcggtttgataccccgcacccaggaaggtatccggcgcgttgccgatgtacagccccttctcccgcgccatgtccatcagttccttggcctgccccagctccgcgcacatgggtttttcgcaatacaggtgctttccggcctccagaatctgcttgcttacgttataatgctccgtcggataagtggtgttgaccacgacctcgatctcgggatcgcttaagatctcctcgttggtcatctgccggatgccgaattcggccgcccgcgccgcggacttctccggaatgatatccgaacagcccaccacatccagaatatcaaagttatacaccatgtttttcaggtactcgccactgatcacgccagcgccaatcagcgctacctttaccggtttccagggtttaagcatggtttttcctccttaaacgcgcacttgcgcccataaagaaggccctgccagggggaagggaacacgcagccttcccccctaacataggcccgaaattagcagttgttctgatccatccggagtcttatttgtccaggtccgcaatcaagccttccagctgggtctgcagagtcgccagggtatctttccagccatcttcatccatggtcagcgcagcctgcatgcaggtctggtcaaacttctgtccctcgaccgaagaggcactgggcacgccgctctgcagcgggtaaaccagttgtaccgcattggacagtacgcggtcgatgatctgcgcgcgctgcggctttttgaattcgtcgccttccagatagctgatgcgcgccgggaagccgtcctgcttaccgtcggtccagatggtgtaggtgttctcagaataccacttgaggaacttcatgccttcctctttattctgggattgttcaaacatcatgtaggcgttggggttgacctgcccgttcttcgtgccgctgggcgaggtcagcggcggcataacagccacctgatcgatggtcattccgccgttcaaataggtgttgaaaccgcccgccgagcggatcgaaatgcccgccttgccggccatgaacagcttatccgcgtcgtcaccactatagttgacgataccttcgggcaaagagccatccttttgcagggtattaaacagcttcataacctgcaagttgcgctcgttatccacattggctgtgccatctttgttgtagcacatgccgccgttgccggtggcaaactgcatgaacgggccggcgctgccagtggtcacgccaaaggcgacgccatagatcccctgatccttatccgtcaaagccttggccacggcgataaagtcatcataggtttcaggcatttccagccctttttcttccagccagtcgatgcggataaaggtcgcccgcgggtcgtagttgaacggaatgccgacctgcttatcgtggaaacgccagtaatccagcatcccctcgtagaagtctttatccgtgccctcttttttccactcgtccacgatccactgcaggtccgccatctcatcgttggtggagaactggaagggcatatagccgccgcccgtgcaaacatccggcgcgccgttggaggctacggccgtagagaactgctcataccagttgctccagggcaggtttgtgtactcgatggtgacatgaggcgccacttccgaggtatacttggcgatgatcttttcggattctaccggaaatgcctccgccgggccccaggccatatcccagaatttcaacgtgacgggttccgccgcgctggtagattctgttgcggtagcgtccccggaggtttgcgcgccgtcggttggctcggttgcgggcgcgccgccgcagcctatggctgagaaagccattgccacgaccagcagcaggctgcatagcattgagatacgtttggacatgtgtgttttcccccttcattggccttttcttttatatcggcctttttataagtaccgtcccgctgtttagggcggttcctatcttcatcagtggttaaatacatattcggtatagcccgtagtaatgccggaggccagggctgccgggcgctcgcagctgctttgcatttcgtaatagcgtcccgtttcgccagattcgatcatccccaccgtcgcctccaggaaatgataggccagttccgcatccgcccgcgccttccggccgttgcggatggcgtaagcgaagtctgcaacgccgatgccccggcaattcgggtcggtataggcgtgggtcagctgcaccgggaagtattctttattgccggtgcgccgcaccagtacctcgccgccaaagcagttggggtccgcacagacgatcgtgccttccgtcccatagatctcgagctgcggggtctccgagaagcactctgatgtcgtggtgatcgtccccaaaacgccggaggcaaattccagcgcgcccaacgtattgttgggggactgaaccgggatggtctgcccatactgcggatgagcgggattaacatataacttttcctttgaaaccgtttgagagaagccggcgacccgcttgatgggccccagcagattgatcagattgacgaggtaatagcaccccacgtcaaacatgatgccgccgccgggatagaaggtaaacggcagcttgtcttcagcgccgcccatcaggtggtacccgcggatcagcgtagcacgggccgtgatgggcgtaccgatcatccccatatccagcagcttgcgggcggtttgcgcagctccgcccaggaaggtatccggcgcgttgccgatatacaggcccttcgcgcgcgccatatccagtagctccttggcctcttccttggttgcgctcatcggcttttcgcaatagaggtgtttgcccgcctccaagatcgatttgcttacagtgtaatgtgccgtgggataggtggtgttgaccacgacctcgatctcagggtcgctcaggatctcttcattggtcatctgccggatgccgaattcttttgcccgggcggccgaccgctccggaatgatgtccgagcatcccaccacatccagtatgtcgaaattgtgtaccatgttattcaggtactctccgctgatcgtccccgcgccaatcaacgccactttcaccggtttccaaggaatcaacatgattaaaagaccctccttcgttttacatgccgtggtaatatagataatttttctctcccctatgtcctttttgggtataaggaaacagggtagcgaaaaagcatgcccgccactgtttataggactagttctttttattcactcgctcctgggtttatgctattgataaccatagatcatccataatgtgaagtttgtagatgaaaaacaagctgcccaaaaaagaaatgtgatctacaatgcttcttttgtcgatccgcctgggtttttactacgctagtacttaagcaagaaaggtaaataattcttcgatactgtcagatgcgccggtaattcttttcaatgcgattgcttcatctaatgtaaaatagtctttgcgttcgaatttaagtaataaaacctcataatccagccctaaggctgccgccaactctcttttggtcatcccaattttgaccagtatcgattcaatgcgtggatacatattctcactccatgaatcgctatagcgatttttgcaagtagttttttgaaatatttatattgtgtcgttttttattgtttattccttttttacgtgctattctgtctttgaggtgaattccttgcaaagagaagcgtatatcaagctactaattaagcagaagaatatgacttacaagcaatttgctgagtcgatcgggatgccctatagtacgctgttatccattctgaacaatcaagccatcggcaaagcctcaatcgataatatcatcaaaatctgtcgcggtctttctattacggtggatcaattgcaacatattgtagagcaggatatacccgaagcgccgcttcttttgtcttcgcacgaggaagcgttggttcgccattaccgggaacgaacggggctgcagcaggcagtggacatcctcttggggctttgatctcgcgaaggatctccttcgccctgttgatttaccattattattgtatgcctattctatttttacgtgcatttataggtaaaaaaaactgacttttctcacaaacatagcgctcgccgcaatcaaaaaactatatataattttgcctgattttataatactatattttgccttattgatcgttcaaatgcgaagcagtttggatgaatgtgtatatcctatgaatccactatttatatagttattccagcaggcttccattgaatatcccctcctttttttcatggtggatatttacaaacatccatcgctttggtacatccgcttgcatcccctgatccatctatttttacccctcttcgctgcgcgcacaaaaaagcgaggcggaagaatgtttcttccgcctcgctttttcaattctctaaccaggaaaaatatcgcgccttaacccgctactttatcctgctgatcgatgatcttctggaagtcggcctgcaggtcgtccagcgttttcttcattcccgcctcatccatcgttaaggcagactgcatgatcaccatgtcatacttctgaccttccgcggaggaagcgctgggtacgccgctgatcagcggatagcagttcgtaatggagttagacagcagtttggtgatcgcctcctggcgataatcctttttaaactcgtccagctcgtccatgaagctctgacgcgccgggaaaccatcttggccgccctcttcccacagcaactggctgttctcagagaaccatttcaggaactccatcgcctcctgcttgtgctgagactgctcgaataccagataaccattcacgcacagctgcgccttctgcacgccggagggcgatttcagcgggggaacgatcttgacctgatcggtcgtatagccatccttggtcaccgtgttcttgtagttgccaacgcccttgatgcagatcgccgctttgccagcgttgaacaatttcacacagtcatcgcccgcatagttttcgataccatcgggcaggcagcctgcgtccttcaatgcacggaagaacttcatcacctgcaggttacgctcgctgttgatgttcgcgttgccttcctcatcatacagcataccaccgttgccagtcgcatagttcataaacgggcccgccgcgtccgaaacgatgctataagccacaccatagatctcgttctcacggtcagtcaacgctttggccacattgatgaactcgtcataggtcgtcggcatctccaaacccttttccgtcaaccaatcgtagcggatataagtcgcgcgcggatcatagttgaaggggattcccacctgcttatcattaaagcggtagtagtccagcatgccctccaagaagtcgccatccgtgccttcctttttccattcgtccacaatccactgaatgtcggctacttcgttgtttaccgcgaactggaagggcataaaaccgccgccgatggccacgtccggcgcaccgttagaggccacagccgtagaataggtctcgaaccagttgctccagggcaggtttgtgtagttaacagaaacattgggcgctacttcggtggtatagcgctcgataatggtttccgctgctaccgggtaggtctcagccgggccccaggccatgtcccagaattccaggttgacctgttcgccgctggtggcgccgtcaccagacgcgccggagttgtccgcaggctgcgagcatcctacgacagagaatgccatcgccacaaccagtagcagacagaatacgacagagatacgttttgacattgggtttcccctccttgaagaatttgctacattatccctcgcttaatgtagcgtttattgcaaaccccgctactcaaccagctgatccggcagcgcggcttgtaaactacaatttccccctgacctcacaacatgatacaaaatgtaccgcatttcgtgaaacttgcaccatcataacagaccgcttcaaggggtgtcaatttcgaggaggagcgcctttcggcattgagaatatatatattttttggataattttataatacctgtattttttactcacttaagacttgaccagcgccgttttttaatttgtgcaaacaaaaagggaggcgatcttaagatcgtctcccttttaaaatcttcagactaaccggacttatttatcctgctcgtcgatgatcttctggaattccgtgttcaggtcatccagcgttttcttcataccagcctcgtccatggtcagggcagactgcagaatctgcatgtcatacttctggccctcggcaacggaagcgctgggaacaccactgagcatggggtagcacagcgtgataccattgttcaggatcttggtgatcgcttcctggcggtactcttttttgaactcatccatggtatccatgtagctcacgcgagccgggaagccatcctgggcacccttgtcagaatcccacagatcctggctgttctcagagaaccatttcaggaacttcatcgcttcctgcttgttctcagactgctcaaataccaggtagccgttcacgcacagctgagccttctgcacaccagagggcgatttcagcgggggcatgatcttgacctgatcggtggtgaagccgtctttggtcacagcgtttttgtagtcgccaacgcccttgtagcagaacgccgcgccgccggcggcgaacagcttggtgcaatcgctatcggcataagcctcagtaccctcaggcaggcagccttcatccttcaaagcgcggaagaacttcataacctgcaggttgcgctcgctgttgatgttcgcgttgccgtctttggtgtacagcataccgccgttgccggtggccatgttgttgaacgggccagccgcgctgcccacaacggagaacgtgaagccgtagaatccattgtccttatcggtcatctgcttagtcacgctaatgaactcgtcataagtcgtggggcactccaggcctttttcttccagcaggtcggcacggtagaacgtcgcacgggggtcatagttgaacggaataccaatctgcttatctttaaagcgatagtaatccagcatgccctccaggaagtcgccgtcggtgccttccttcttccactcgtcaacaatccactgcaggtcggcagcttcattgttcaccgcgaactggaagggcatgtaaccgccgccgatggccacgtccggcgcaccgttggaagccacagccgtggaataggtctcgaaccagttgctccagggcaggttcgtgtagttgatggagacgttcggagccacctcagtggtgtacttctcgataatggcctcagccgtgggcggatagttttccgccgggccccaggccatatcccagaactccaggttcaccggctcggagctgtcacccgtagacgcggaagcgtcgccggacgaagccgaaccagcagagttgtccgcgggctgcgagcaccctacgatcgagaatgccatcgccacaaccaacagcagacaaaagacgacagagatacgtttcgacatgtgtgttcccccttttgaaatactccggcacaggctatcgctaaaccctctcaacaacttgtgccgttacagtcccaatagtctgaagacaaatgggaacttgtaaccctctcgtgaacaatatgtccttcatacataaattacgtaattaatgcataaaaaacggatactgcatggacgattatagcagtttacaaagatgagtgtcaatcaaaaccctgcttagcctcatttattcttaattttgacataattaattatcttttgccttaattttgttgacaaaagaaaaagagaggcgattttttcgcctctctttattaggatagcctatgccttagtcctgctcgtcgataacctcctggaattcggcgttcagtttttccagcgtatccttcatgccctgctcgtccatggtcagagcagcctgcatgatctgcatgtcatacttctggccctcggcaacggaagcgctgggcgagccattcagcatgggatagctcagcgtgataccgttggacaggatcttggtgatcgcctcctggcgataatctttctggaactcttccatctcgttcatgaagctctggcgagccgggaaaccatcctgggcacccttctcggaatcccacagatcctggctgttctcggagaaccatttcaggaacttcatcgcttcctgcttctgatcagactgctcgaataccaggtagccgttcacgcacagctgagccttctgcacaccagagggcgatttcagcggggtgaggatcttaacctgatcggtagtgaagccgtctttggtcacagcgtttttgtagtcgccaacgcccttgtagcagaacgccgcgccgccggaagcaaacagcttggtgcagtcgctatcggcataaccttcggtaccatccggcaggctgcccgcatctttcaaagcgcggaagaacttcataacctgcaggttgcgctcgctgttgatgttcgcgttgccatctttgtcatacagcataccgccgttgccggtggccatgttgctgaacgggccagccgcgctgcccacaacggagaacgtgaagccgtagaagttgttggcaggatcagaaagcttgctggtcacatcgatgaactcatcataggtggtcggtacgtccagacccttttcctccaggatgtcggcacgatagaagatcgcgcgcgggtcgtagttgaacggaataccaatcactttgtcatgatagacatagtagtccagcataccctccaggaagtcatcagtggtgccttccttctcccactcgtcgatgatccactgcaggtcagcagcttcgttgttcaccgcgaactggaagggcatgtaaccgccgccgatggccacgtccggcgcaccgttggaagccacagccgtggaataggtctcgaaccagttgctccagggcaggttcgtgtagttaatggtaacgttcggagccacctcagtggtgtacttctcgatgatggcctcagccgtgggcgggtactgctccgccgggccccaggccatatcccagaattccaggttcaccggctcggagctgtcacccgtagacgcggaagcgtcgccggacgaagccgaactggcagagttgtctgccggctgcgagcatcccacaacggagaatgccatcgccacaaccaaaagcaggcaaaatacgacagagatacgttttgacatgcgtgtgttcccctttctgtttttcttcgcccttccaatatagaagagctgattataaatagagcaccaatcatgttccattcataatctttcattttgatgttataatatcaaaacaaaataagcttagtcaactaataaaacagggggatttttgaggacttttttcactttttttacatctacttcttatttgacgctaattttccaagaaatgcataaaaaaagagacggctatgccgtctctttttagcagttacgaatggattttagtcctgctcgtcgataactttctggaattccgtattcagtttttccagcgtatccttcatgccggcctcgtccatggtcagagcagcctgcatgagctgcatgtcatacttctggccctcagcaacggaagcgctgggcgcgccgctgagcatggggtagcacagcgtgataccgttggacaggatcttggtgatcgcctcctggcggtaatcctttttaaactcgtccatctcgttcatgaagctctggcgagccgggaaaccatcctgggcacccttgtcagaatcccacagatcctggctgttctcagagaaccatttcaggaacttcatcgcagcttctttattttcggactgttcaaataccagatagccgtttacgcacagctgagccttctgcacaccggagggcgatttcaaaggagccatgatcttgacctgatcggtggtgaaaccgtctttggtcacagcgtttttgtagtcgccaacgcccttgtagcagaacgccgcgccgccggcggcaaacaacttggtgcaatcgctatcggcataaccttcggtaccatccggcaggctgcccgcatctttcaaagcgcggaagaacttcataacctgcaggttgcgctcgctgttgatgttcgcgttgccatctttgtcatacagcataccgccgttgccggtagctacattgctgaacgggccagccgtgctgcccacaacggagaacgtgaagccgtagaagttgttggcaggatcggacatcttgctggtaacatcaatgaactcttcgtaggtggtcggtacttccaggcctttttccgccaacaggtcggcacgataataggtagcgcgcggatcatagttgaaggggatgccgatcactttgtcatgataaacatagtagtccagcatgccttccaggaaatcgccgtcggtgccttccttcttccactcgtcaacgatccagccgatatcagcggcctcattgtttaccgcgaactggaagggcatgtaaccgccgccgatggctacatcaggcgcaccattggaagccacagccgtggaataggtctcgaaccaattgctccagggcaggttcgtgtacttaatggatacgttcggagccacctcggtggtgtacttctcgataatggcctcagccgtgggcgggtactgctccgccgggccccaagccatatcccagaactccagttcgaccggctcagagctatcggtgctggcagacgcagaagcgtcgccagacggagccgagctggcagtgtcatctgccgcgggctgagaagagcatcctacgatcgagaatgccatcgccacaaccaacagcagacaaaagacgacagagatacgtttcgacatgtgtgttcccccttttgtaatgatcgagtgcagcccgtctttttgaatctcttcaaaatataaacgccccactctattgcaaatacatgttcttcccatgggatatgaacatgtatttgtaacctcagcaaggataaatatgtcacaataacgcaatttgtgtaatcattgcagtaatcatgaatatttcatgtacgattatagcaattagaaacattttcgtcaactaaaacatatttcctccttattatttcacatttaagacacaataaaaagagaggcaccgccgcgcctctctttttgctagtctaatcttctttcctaatcctgctcgtcaatgatctgctggaactgctcatttaaatcttccagcgtcttcttcataccagcctcgtccatggacaaagcggcctgcaagcagatcatatcaaacttttgaccctctgccgcggaagcgctgggcgcgccgctgatcatggggtagcacagcgtgatgccgttggacaggatcttggtgatcgcttcctggcggtaatccttcttgaactcatccatctcgtccatgaagctctggcgagccgggaagccgtcctggccgcccttgtcctgatcccacagatcctggctgttctcggagaaccatttcaggaacttcatcgcttcgggcttgttttcagactgctcaaataccagatagccgtttacgcacagctgagccttctgcacaccggagggcgatttcaagggagccatgatcttgacctgatccgtcgtaaagccatccaatgtcacagcatttttatagtcgccaaccgctttgtagcaaatcgccgcctggccagcgctaaacaatttggtagcatccggtccgctgtaaccctcgatgccctcgggcaggcaaccctcgtccagcagcgtgcggaagaatttcataacctgcaggttacgctcattgttgatgttcgcgttgccgtctttgtcatacaacataccaccgttgccggtagcatagttcatgaaaggaccagccgcatccgttacaacgccaaacgcaaaaccataaatgcccttttccttatcggtcatctgcttggctgcgctgatgaactcatcataagtcgtgggcaccgcaacgcccttttctttaaaccagtcgtcgcggtaataggtcgcgcgcggatcgtagttgaagggaatacccactactttgtcatgatacacgtagtagtccaacatgccttccaggaagtcgccgtcggtgccttcctttttccactcgtcgatgatccactgcagatcagccgcttcgttgttcactgcgaactggaagggcatgaaaccgccgccgatggccacatccggcgcaccgttagaagccacggccgtggaataggtctcgaaccagttgccccagggcaggttggtgtacttgatcgatacgttgggcgctacttcagtgcagtacttttcgatgatagcctcagccgcgggcggatacttttccgccttgccccaggccatatcccagaattccagttcgaccggctcagcattgtccgtaccggcagatgtggaagcatcgccggacgaagccgaaccagcagagttgtccgcgggttgcgagcatcctacgatcgagaatgccatcgccacagtcagcagcagacagaagacgacagagatacgtttcgacatgtgtgttccccctcttgaattacttgagtgccggctttatttgtatagccagtccaccctattgcaaatatcagcccgtcccctaaccggcgagatgatatttgtaatcccagcagcagaacaaaagatgtaatgtgacaaaacaggaaatttgtgtacccattgtgtttgtaacagatatttcttggttaatcataactttttgccttatttttgtcaatatataaatttgtcgtataatagcgaaacggggcgcagccaagctgcaccccgttttactttgcttatagctgttaatcaatcctgctcatcgatgatttgctgaaattcattatttagtttttccaacgtatctttcataccctgctcatccatcgtcagcgccgcctgcaaaatgatcatatcatatttctggccttcagccattgcggcgctgggcgaaccattcagcataggatagcacagcgtaatgccgttgttcaggatcttggtgatcccctcccggcggtaatccttctggaactcgtcaagctcgttcataaagcttaggcgggccgggaagccatcctgcgcgcccttctcctgatcccacaggtcagcactgttctcagagaaccacttcaggaatttcatggcttcttctttatgcgcggactgctcgaataccatataaccgttcacgcacagctgcgccttttgcacgccggagggcgatttgagcggaggcatgatcttgacctgatcggtggtataaccatcggtggtgaccgcatttttatagtcgccaaccgctttgtagcagaacgccgcctggcctgccgcaaacagcttggtggcatccggaccgctgtaaccctcaatgccctcgggcaggcagccttcgtccagcagtgtacggaagaacttcatcacctgcaagttgcgctcactattaatattcgcgttgccgtctttatcgtacagcatgccgccgttgccggtggcataattgctgaacgggcctgcggaatccgaaacgacgccgaaagcaaagccgtaaaactcattctctttgtccgtcatttgcttggtcacattgatgaactcatcataggtcgtggggcattgcagacctttttccgccagcagatctgcacgatagtaggtcgcgcgcgggtcgtagttaaacgggatacccactaccttgtcatggtacacatagtaatccagcatgccttccaggaagtccccatcggtaccttcctttttccactcatccacgatccagccaatatcggccgcctcatcattcaccgcaaactggaagggcataaagccattgccaatggctacatccggggcgctgttggaggcgacggcggtagaatactgctcaaagttattgttccagggcagattcgtataattgatggtgacattggaagctacctcttcagtataacggtgcgcaatggcttcagccgtaggcggatatttttccgccggaccccaggccatatcccagaactccagggtgatcgtttcaccgctgcccgcctcggtagatgcagaagcatcgccggatggggccgaactggcagcgctgtccgccgcgggctgcgcgcatccaagcaacgagaatgccatcgccacggccaacataagacagaatacgacagagatgcgtttggacatgtgtgttcccccttttgatcatttaacacagccaatctatatttatagctgcgctctatcgaatattcgcgacattcctatcgctgaatatcggtatcaataggtaaatcgggatgaacgaattaaatttacgcccgttagatttgcacgactggaaattagctcaaacgcggattttatgtgaacattatagcgccatcgcggctataaaatcaatctgttcaaatatttttcaaatttgttcacatctatattaataaagcataaatagaggaggcgggtgaccgcctcctctatttggaaacaaaagcgcttgcttttacttatcctgatcctcaatcgttttctggaactctgcctgcagatcttccagtgtcttcttcatgccggcctcatccatggttagcgccgcctgcatgcagatcatatcgtacttctggccctcagccgccgaggcactaggcacaccgctgatcagcgggtagcacagagtgatggagttattcagcacgtttttgataacatcctgacgataatccttctggaactcatccagctcattcatgaaactcaagcgtgccggatagccatcctgaccgccgctgacccacagatcctggctgttctcagaataccatttcaagaacttcatggcttcttccttgtgctgagactgctcgaataccaaatagccgttcacgcacagctgctctttctgcacgccggagggcgatttgagcggaggcagaacacacacctggtcagccgtaaatccatctttggttctggcgtttttatagtcaccgcaggatttgatcacaataccggccttgcccgcattgaatagcttggtcgcatcatcgccggagtagttctcaataccatcaggcaggcagccttcgtccttgagggtgcggaagaaattcatcacctgtaggttacggtcgctattgatattcgcggagccatccttgttgtacagcatgccgccgttgccggtagccgtagaactgaacgggccagcggagttggtcacaacgccgaaagccacaccatagatctctttatccctttcggtaaaggccttggcaacattaatgaactcctcatacgtcgtgggcatggacagccccttatcggccagccagtccttgcggatgtacatcacgcgcggatcatagttgaacgggataccaacggttttacctttaaacacgtagtaatccaacataccttcgagaaaatcgttatccgtgccctcttttttccattcgtctacgatccacttaaggtccgcagcctcgttgtttaccgcaaactggaagggcataaagcctccgccaatagccacgtcgggcgcgccgttggaggcaaccgccgtagaataggtttcaaaccagttgctccacggcaggttcgtgtactcaatggtcacgtggggtgccacctcggaagtatattttttaataattccctcagcggcgaccgggaaggtttctgccggaccccaggccatatcccaatatttcagggtcaccggctctgcttcagcgctagccgaagcagaagcatcgccagaggacgcagcacttgtagatgggtcggtagccggctggttgttgcagcctacgatcgaaaacgccatcgctacgaccaacagcagacaaaagacgatagagatacgtttagacatgtgtttcccctccttaatacaacttatttctcccctatttccccctaaattgaaatgtatggagagcatggcgcccgctgcatgccgacgtatatacataacagaaagcgcccgcggcctttgaccgcaagctcattatatcaaatgtgtcattaatatgtcaatcatgaatttaatatgtacttatcaaacttaattagccatatatagccattaagttcatattttagccatattattcgcaatttctccgcattttatttggacaccaacatacaaaaagagggtgaaccatgccaccctctttgaacagattacaaaaaactccgctactattccacgccaatcactgtgcgcgcgacgcgcccctccagcagatccctgatgctgtgacgcgcatggccaatgatgacccgcgtgcccgcctggacaggccccagtacaaactccagtttagccttagcgccattggcccccgcacggctggcccctacgcaggacttttgcagctcgcgtatggccacaaccacgctttgaatatccgaaccggtaacccgctccaccagcgtggcaggatcgccggggtcctgatagatcccctccacagaggataggatcagcagcgtccgcgcgcctaccaactgcgagatgaccgccgcggtttcgtcgttatccacacactccaccagatgccggttctcccccgcccgcgccttgaggtcgctcagctccatcttgcggttttcctcaaaggataccgggtcgttataattgatgatggggatcgcctgctgcaccggcgcgcgcagcagcatccggcggatgtactcccgcttttccggatcgttaaagtgttgatgctctaccagaatctgccgaacagcatagcgctggtccacaaactggcggtaattattcatcaaaatcgcctgtccctgggccgaataatccgtctttacctcatctggatcgccatagagctcctgccctacgcgcttgatataatccagccggccaatctctgtggccccggaggagaccaggatcatccccggccgcaattctccggccaaacggctgatgatattataatcgatgtcgttctcccgtttgcggatcagcgccatcgacccgattttgactactacgtcgatccccgatgccataatcgcattaacctccctcaacctgtaaaacgtacgcgtttatctgcccctcatcgtaccataatcccgccccaggcgcaacttagtccgggtaatggcttggaatgcctcccagccttaaaacggccacaaacggggtttagcccctttacagcgcgtcgctatagcccgcgcataaaaaagtgcaggaggattctccccctgcacttttatctttaccgcgcctatagccgccaccggcaccgcgaaggggcgcgacggctcaaacatcgcagattagtctgccaccttgatgaccgctttgaccacatccgccttgttttcgcagttatagctcatggcgtgctgcgtatcgtcaaactcgaatacgttggtcaccatgtccttgagcgggatcgcgcccgaggccaccgcggcgatcgccaccggatacaggttgcgatagcggaataccgtgtgcagcgtggcttctttgttcatcagcgtgccgatatcatagggcagaaccgaatccgggctcatgcccaccagcacgatatcgccgccgcgcttgaccagctccaccgtggactgggtggtcaccttgctgccggcggtctcacagaccaagtctacgcccgcgccatcggtcagtttcatgatcgcgtccacggtattctccttggccgcgttgatcaccacgtccgcgcccagctttttggccatctccaggcgcttgtcgatcacatccaccacatagaccggggatacacccttggccttcaggctcatcagggtcacaaggccaatgcagccgctgcccaataccactgcgttctggccgatctgcgcgttcacctgattggcggcgtgcaggcccacggccaggggctcgatcagcgcgccctccatggtggatacgttatccggcagcttaaagcacatatccgccgggtgctctacatactccacaaacgtgccgtcaaacggcggggtggcaaaaaactccacatccgggcacaggttatagcggccggtcttgcagaactcgcacttgccgcaggtcacgcccggctccagggcaacgcggtcgcccaccttcaggttggtcacgccctcgcccacctcggtaactacgccgccgctctcatggccaaggataaacggataatccacgatataatcgccgatcttgccgtgttcgaaatagtgcaggtcgctaccacagatgcccacatattccacctttacgatggccttgcccggggccgccttttcgggcttgggcacatttttcatctcgatatggccaaggctggtcatcactgctgctttcatctctgccatggtttacttcctcctcgtattccccttttaaatgtttcgtaatatcgttaagccccacgtgagcttaaaacgcaccgctatttctggacctttacgccggccttttcctcgtaatactgcaccaggccgccgtgatcctgtccgcctttgccctctgcctgcaggtgtttcatcatctccagcacctcctgcgtcagcgggatgggcgtctcaacctcctgcgccgtttccaccacgttgcccaggtcctttacgtgcagatcgatcctgaacccggggttgaagttgcgctgcagaatcagcggcatcttggcatccagcacggtactgcccgcaagcccgccgcggatggcttcaaaaaccttttccgcatcgatgcccgctttagaggccagcaccatcgcctcactcatagccgcaatattgcctgctacgatgatctggttggccagcttggtcatattcccgctgcccacatcccccactagcacggcagaggcccccatgcacagcagcatcggcttgacctgctcaaatacctcttccgggccgccggccatgatggacagcgtcccatctacagccttaggctgtccaccggaaaccgggcaatccagcatgacgacgccctttttacccgcctcccgggcgatctcctgcgccgccagtggcgcgattgagctcatatccaccaggatcagccccggcttggcgccgctgagcacgccatcctccccacagaccacagtcttgacctggggcgagttgggcagcatggtgacaacaacatcaacctgccgcgcaacatccgccggggacttggccgcctttgcgcccttggccactgtttcggccacagcctcggggacgatatcataaacgatcaacggataacccgcccccagcaggttggcagccataggcttgcccataatacccagcccaataaagccgattgtttgcatcaatctcactccttttggaaggaactgcccattgcttaccctggcgtcccaattccacccctattgtatcatcattatttcgattaaccaatagaaaactttgttttttaacgggcatcattaaattttctgtatcgccgcaggaggtgcataaatacggcagtagataaacagccccaccaccagcgccaggcagatgctgccggtaaacagatagagcggctgtacccgtccaaacagatcgatcagcgaaccgccggccagggaggaggtcacattggcgcagctcagcgccaggccccagatcatcatctgcccgctggtgcgcagctccgggatgaccgatgtggccacatatcgcgccagggcgaagctggtggccgcaaagcaaaaggcgtgcgtggtatccagtacgaagatcagatagggtgaattgataaaagccatgccgaagtggcgaaaggtcattaccgcgccgcacatcaaaaacatgttgcgcgtgcccatcctgcgccagatccggtcggcaaaaaagagcaccggcgcctcgctggccgcacagatcgccaggccgatccccatcagggtattatcgccccccagctcctgataaaagagcgggagaaaattatggtaaaagttattggatacctgcatcagcacaaaggtgaccagcagaacgaccagctcccggtcccgaaacagcagccacatggaggcttttttaccctgcgccgcgctggactggcggcccgggacgaccggcataaaaaagcacagcacggccagcacgcccagcgctgccagcagcacgtaaaagacgttgcccgcgctgcggtccatcagggcgccggtcaccagcgtggtcaacccatagccgatgggaccgcaggcccgcgcccggctataactgccgcctacgctgtccagatactcgatagccaccgaatccaccattgggttgagcggttttaaaaagaaatagaacagcgacgccataacgatgatgtatggaaatgtattgttgagctggatcagcgaaatgaccacgatcatggccagcaccagcagctgtaccaggcgcatttttgagcggctgtgatcccccgcccatccccagaccggctgcgccagaaagcccatcacggcgcccatggccaacacctgtccgatctgcgtggctgtaagccccgccgcatcataatagaccgatagaaccgagttacaggccgtggtcacatacaccagcccgtaaaatagatagaactgcccgatccccttcccgcggcgcgccgcgctttctccccccatgagcacccatcccccttttctatttgcgccgggagcggcccgcccccggatgataacgggatgatccggccctgaacaggccggtgggcgacaacgatatgcccttttctctatttctataatattggtttataaggattaaatgtgtaaagcgagccactcctgctcgggatccctgacctttttcgagagcagtataaacgccgccgcggcggccgccaccagtccccccgcgatccagaataccggctggatgccgcccatggcgtctaccagcatgccgccaaacaaggtagaaacgattttggcaaaactctgcgccagtacccacaccagcatctgcccgctgatctgcagttccggcactacagagcgcgcgatatagcgcgctagggcgaaggtggtcgccgcaaagcagaaggcatgggtcatatccatcaccagcagcatggccggctgggccaccagggccaggccgaaatagcgcagcatcataaaagcgctgctgatcagcagcagcttgcgcgtgccgatggcgcgccacaacttatcggcaaatagcaaaaagatcacttcgctcaccgagcaaagcgccatgctgcagccgatgaggttattgtcgccgccgctgatatccgaacagaatacggcctcaaacgccgcatagaagttatgggatatctgcatcaggaccaggaagcccagcagcagcaacagccccttatccttgaaaagatcgcgcatgggggcgcgcttgggcagcgcgccttccggcaggggggtatggggcaaactgggcaccttaaagcccagcagcgccaccagcgccaaaatcgcgaccagtagataaaatacgtacgtgggccggccgttcaacagcggccccagcgtcagcgagatcagcccaaagcccaacgggccgcaggcccgcaccacgctgtagtgccccccggtacggtccatgtattcgatggtcagtgcatccgtcatggggatcagcgggatgaccaaaaagaaaaacagcgtaaataccaatagcacgtaaccatagctgcccgaaaaaggcatggccgccaccaccagtaccaacagcagggccagcagctgcaccacgcggatcttggatttggcccggtccccagccttaccccagatcggctgcgccagcaaggataccgccgagcccacagccaggatctggccgatctgcgcgactgaaaagccgatgctctgaaagtagatcgaaaataccgctgagcacgcattgatcatgtacagcagcgcatagtagacgcaaaaaatcttcataccgcgacgagcgctggcgcctggattcataggatcacagtactccttctaaaagggtttgtttttttgcggctactgtccgcttttctcgctctgtgcctgaggctccggctcctgggatgccggggcgggcggctcctgcgcttccggttcgctttgctccagcgcaggctcgtcctgcggcggcgccggctcatccttttgcttttgagcgtcctcctggcttaaaagatcgtaccaggccctgggcggctcggagggatgggtggtaaattccgggtccgaaaacagctgggccacccgcttggcgatgtccgcctcggtctccgcctcgccgttcatctcctcttgcgcctgttcctggactgcggaaacgctctgcagcagcttatgcaggatctcatgcccgccaacgcatccttcgatcgtctcaataccgctcagggcggtagccaaccattcatcgctgggcgcgttgatgaccaactccgcatcgtcatataaagccacggtcgccaaactcaggcggcatacggcgtcgtaatactccacataatcctttagcgaaaagcggttgagcgcggcgctgagccgtttcatatctcccggggcgatcagcagaaaatctcccggccactccccttcttcctcgctggcgtatagcagctccgccgggggcgcaaagaacaccacacagcggcgccgtccggtcatccgtttgatcagcccggatttgagccagaccgccgtttccttttgcaccggcgtttcaatctccttttctgagcggagcatgaccgcctcgcagatattggtgaccgccgccagattttggcacaccaggcgcaccaactcccgtggcagggtcttttttgatttatgtccgcggcccttggccagctcctcggttaccagaatgatcgattgttcttcgcgttcgataatccatctcgtattgctcatagcttcctccatctatctaaatacccatcacaaagcgataccattgcgccatagcctcaaagcccgcccgcacttcctgggccagctgaggcgtaaagagccctgcccccaaggggccttcaaactccaaaaacaggctcttgcggtttacccagggcttgaggtccgcatcgatttcgggcttgcggtcttttttatacaggtctccgccaacggcaaagtccttgagcttaggctctgaaaggagctgacggaacgtatccgggaaggcctccacccggtcccgaaaggcgttcatcagcgggcgcacctcgccccaaatcccgcagccatagtgataaccctccagcgtcacatcaaaaaagaagccgtgggcctcactggcccgcgtctttggcggcttgtagccgatccacagatgatcccggtaagggcttttatccttgctaaagcgcgtatcccggttaatgcgggatactacccgctccgggcgcacttcaagagccggatcgatgcgggccaccacgggcgccagttcggcggccagggctaaaaagggctcccgcgccacgcgcttatagacctcccggttcgcatccatataagccttggaattattcagccgcacgcccataaaaaaatccagcaattccggagaaaaacccgtaaaggccattgtaatgatccctccccataatccgacactttattatacctgctcgccccccgcaaatgcaaccctgcctcctcgcccggggacagcgcgccgcaacgtccgaaaacccgatattcgggcatttttcagggacaagacaccggtcgagcccttgtttttaggtacaagaataacaaaatgttacattttattctgcgtcgcccgtgcagcaaaaaggcgaggggttcgactcccctcgcctccggccgcgcttacacctgcgacttatcctctccatcatcatctatcggctggaccggcagccggcccgcattggcatcccgccggacgttgatctgcccgtaggcgttctcctcccagctgcccggctcatcctcttcccaatccggctcctgcgccgcccgccacagatcgtcattcatcagcacggggccggggccgctaagcgcatcatcctcctgcagctcttctatctccggtgctggaggctgcggctgccccatgggcagaatgtccagatcgtccatatctctgatcggcccctgcgacaacccttcgtcctcagcatccggttgcatatcctcctctggcaacgggtccggcaccgggcgcaccacccgtccggtgggaaccgccggctggggcctgccgtcctttgtcccgggtttgggacctttaggcccgtgttttttctgctggcgcttgaggatgatcagcaccacgcctgccgccaccgccaagaaggcgatcacgcccaaaacgctccacagcgccgtcatcatgccattttggtcctcttcgccctcctgggcctgatcgctcagcacattaatggcgatgggcgcagcgcggccgctgccctctataccagaggctgtatccactgccttgacggtgaattcatagctctgggatttgagcacgcttaaattgatctccaccgtcttggtctcgcccgcagccagctccccggtcaccttctccagctcgccgctatttgcctccgagatgaccagatcctttaaggcgtttttaccatagtttttcatttcgaccgtgaacttgaccgttcccggctcttccaactcggccgggtcggccttgacctggacctgcagatccaccgggttcccctccaacttgacctggaagttcagcggctgcccctccgttgtaaaggtggatcccgttaccgtattgatcgcgctgagcttgaactgtaccgtctggttcttttcgatcttcagctcctgctcaaaggcgagcgacttgcccgcctccagctgctcggcttgatgcacgacgcccaggttggcgtcgctgatctcaatatttttaagggtaatattgccgcggttaaccacctctgtcttaatggtgactgtatccccggccgcaggattcatctgatcgcaggtggtcttaatatccaccgtcggcacagccacggagattagcagcgcatccagcgtcttggcatagccctggcccgcagcggaaaaggtcaccgccggtgtagaattgatattcgcctccaccgagaggctatgcgtcagggtctgcgtatcccctacctgcagcagatccagctttttattaaagtgcagctcatcgtcttttacctggatattggtgattgccacattgcccgcgttgcgcagcttataggtcacattgaccgtcccccccggctctaccggattgcggtccacctcccgggtaaactccagcgacggcgccgccgatatctttttgacgactaccggtatggcctcgctatactgctccccatccagggtataatgcagctgcaagggcagagcttgccccagctggctctcggataagtcgtactcgatattcgtcgtgcggttgcgtcccgcctcgatatcctgcagctcctctacgatctgcccgttttcctggatcgtcacgcccgtcatcgtagcgttgcccacagggttcttgaccgttacggcgatcagcacggtccccgccgcgctcaactccgccgggtcagcggaataggaaatatccacaccggtactgggctgcgccgccgcgctggggatcatcagcagccccgccatcagcagcgccaatatcagggcgatcccccgccccgcagtctttttgcgcatcagtcctccacctctttattcttcaatctccctcgtcggggtgcataaatacgcatatcttaccaattttattctacttttcgcgtctattactgtcaagtaaagtttatattgcaggcgcgtaaggcactgcccgccgcgccttgcgcacaattgcggcgcatgttacactgggcatataagccggggaaaggagggcaaaacagatgaaacgggtattatacatcgccggcgttacgctattgctggcgctttttacctatctttgcacatttttaaggccggcagaggtttcgccgcttgagatcttgcaaatggatacggcctcccgcatcgacgtactgctctgcccgcctggcgaacctcagcaaaatacgcgcctgaaccgggaggaaaccgcgttgatgatcgaggctgtacgcacccttccctttgatacggtgcatgccgcgcctccgcccagcgatatccgctatattgccagcatcgagatcgagctgcgcaacggcgacctgctcacctttttcctgcccgaacccgggaagaatcagggcctgttgctcaacagcatttactacccttttacggatatgcaatcgcattttttattcgatattatgctctctaccggcgactttgtatggcccgccgcctagtgcgcgtgcacgggtctcgtcagaacatcgaacccccgccaggtacccggcgggggttttctatattgcctatggatcaaaaagtgcggtcagcgttattccttaggttcgtcctctgagagatgctctgcatcgggttcctgcgccggggcactgccgtcctcctgcggcggcagacttccttccccttccggctgtgcatggccagcctccggatccgccgcatccagctgcatgggctggttaaagcgcttgctcaggatcaggtacagcccaattgggatcaggatcacgctgatccactgcgaggtggaaaggccgccccatacgccgcggatcgcgtcatagcggaagaactccagcacgaaccgttccacaccgtaggcgatcagataggtgcccagcaccgcggtctttttatgggtgcggttgccgataatgtacagcgccacacatagcacaaggttaaaccccgcttcgtacagctgtaccggcaacagcgcaaccccctggggggcggaggaattggccgcaaagatcacgcccagcgggggctcagccgggcagccgtagcagcagcccgccataaagcagcctacccggccgatggcgtgcatcagcggcagcgccggaatgatggcgttgagcaacgcccacttgtcgaccttatactgcctgctgtaaagcagcagaccggcaaccccaccgataaacccgccataatagaccagcccgcccaacgtcgtcagccaaaattgctgaggattgctctgtatcagggcaaagttctccacgatccagggcatcatggtcagcatatacagaagcttggaacctataatagcgcccgcgccgatgtaacaggcggcatagatcacatcatcccgcttcacgtggtaacgcgcgctgcgcttaagcgccaggatgatccccagcaccaccgcgcacatcaacagcaacccatatgtgggcagggtgacatttccaaagagatggatatatggatacaatttgcattctccttaatatgaaagtaaacagcagcccaggaaggactgctgtttaaattttgtctattgcactggccttacatcaagctgttgagctcgttgatcaaagactgccccgcgcacgccgcacagcccagcggaatcgcgcaggagaagaacataatcgcgttcagcgccagaccgatgatagaaagaacgaacccggcggtcgccacgccagcggcaccctcttttctcgccttaacacccatcaccaaaccgacgatacccagcgccaaaccaatgtaagtaccccaaacggtcagccacaggaaaatacaaacaacgctgatgatacccaacaccagactggctactgccgtaccattacttttctgctccatagttaaattgctcctctctcatttaggattctttcttattatatgagcttcgtattttgctgtcaattaaaagaaaacaacttctgacttaaacgttatttttattaccttttttgtattttgattgaaagggtaaaaaaggccgcccggaacacaaccgggcggccctcatcagcgccccttaaaggatggtgatccagccgtgattatccggcagctcaccgtactggatgcccgtcagggtatcgtacagcttttggctcagctcgcccgtggtaccgtcgccgatcttaatgacgcgatccttccatttgagctcgcccaccggggagatcaccgcagccgtgccagtaccgaatacctccagcagctcgcctttatcatagcggtcaaacacctcttggatgctgatgcgccgctccgtggtcttatatcccatatcctgggccagctgcagcacgctcatgcgggtgatgccgggcaggatactgcctaccagcgccggggtggtcacctcgtcgttaaagcggaagaagatgttcatggagcccacctcttccacgtatttcttctccacgccgtccagccaaagcacctgggaatagcccagcttcttggcctcctcgcccgccagcaggctggccgcgtagttggccgccgttttggccgcaccggtgccgccgcgcaccgcacgcacgtaattatcctccacgtagatcggcacaggatccagccccgtggcataataggcgcctaccggcgaaaggatgataaagaaaatataatggttggatgcgcgcacgcccaggtgcggatccgacgcgatgatggtaggccggatgtacagcgatgtgccgggcgcagagggcacccaatcctgctctaattccaccagttttttaagcgcgtccaccatgaagtcgacatcgatctgcgggatgcacagccgctcagccgagcggttcatgcgcataaagttctgctccgggcggaatagacgaatcttcccatccttgcagcggtacgccttaaggccctcgaaaatggtctggccatagtgcagcaccatgtccgccggatccatctgaaaagcgtggtaaggctcgatcttcgcatcgtgccagccctcctccgggctgtagaccacggtcagcatatggtccgtaaaaatattgccaaagcccaacttgctttcatccgtcggtttggctttgagtgttttggctttctcgatcatcaattgcatattcgtcctccaatccggctgcccggcagccttaatcctaccgttttacatgtaacattatcatacacctgccggcttccgcccgcaagcggttacgccgttttatggccccttttaccccggcgccgccttttattcgaggatatcccagggccaataaagggtatccaggcgctgcggctgtgcgccgccgctggtcatatcgcgcattttagccgtaaagagtgcttcctcctgcgcgcgcagcagcacctccaggtacacatcctgcccaaaatccgtgtgtagcacccggaagggggagtgctgcagatagttctccgcgctgccccatatcccataatccagatgcagcccaatcttgtaggaaagctgccacaccgcgatgccggcctgggcgatggcctgggccgccgtgcccgagaacgcccgggtcagcccgccggcacccagctggatgccgccgtaatagcgcaccacggcgcaaactacgttggtcagttccttttgcttaaacacatccagtatcggcatcccggccgtgccggatggctctccgctatctgaaaaccgctgtatattctggcgcatcccggccatataaccataggcaatggcgctggaaagcggatgggctttgtgcagatcctcgataaaggcgagcgcctgcgcctcgctttcgatcggggccgcatagcctaaaaagcgggatttttttatgacggcttcgcttttgccctccgccgccagcgagcgatagctggtgatctccataagccgcctccgtacgctttagtcctccgtcacgacgaaacggtggaagccctttttgcccttttgcagggtgaaggtacgcgcgtcgtaccggttcgggtccacctcctgctccacatcggccactttctccccttcgatcttaacgccgccgcccgcaatcagccgccgcgcctcgcccttggatttgcacaggccgcacagcgccagcaggtcgatcacccggcggttattttcaaagatctcgcaggtgatatggctggtggggatggatccgccgtctgcgccgccgccaaacagggcttccgccgcatcctgtgcctgcttggccgcctcatcgccatggatgatgcgggtgatctcataagccatgatgcgtttggcctcgttgatcttctcatcttggtaggagcccagccgccggacctcttccatcggcataaaggtcagcagtgccaggcacttttccacgtcacggtcgtcaatattgcgccagtactggtaaaaatcgtaggccgagcacttggccgggtccagccacaatgcgcccgccacggtcttgcccatcttgacgccctggctgttggtcaacagcgagaaggtgagcgcaaaagcctcgccctgctctttgcggcgtaccagatccgcgccgtaaagcatattgctccattggtcgtccccgccggtctgcagtttgcagccgtatttttgatagagcaccaaaaagtcataggactgcatcagcatatagttaaactccaaaaaggagagcccgcgctccaagcgctgtttaaagcactccgccgtcagcatccggttgaccgagaaatgcacgccgatatcccgtaaaaactcaacataattcagattcagcagccagtcggcattgtccaccacaaacgccttgccctcaccgaagtccaaaaacttggaaagctgctttttcatgcacgccgcattatgatccacgatctgccgcgtcatcatcttgcgcatatccgatttgccggaaggatcgcccaccatggccgtgccgccgcccaccagcgcaatgggccggtgccccgcccgctgcagatgcgccatagccatcaccgggatatagtgcccgacgtgcaggctgtccgccgtgggatcaaagccgttataaaaggtgacctgctcccggtcgaaaagccggtatagatcctcctcgtgggtgacctgttgaataaatccgcgttccttcagggtatccattacgtgcatgggtctttgtcctccttcatcctctcgcatccgcgcgtcttaatggtgccgcatgagccgccccgccacaaaacgcctttttcagtatagcaagccagcgccgcggcgtaaagataacggggagcggaaaaaagaaaagctccggtccttgaccgaagcttttctgccgcaaaatccatcatctatcaaggggcagcacaactccggccgggccaacgtaaatagagccctgcacgtatacgcgcgcataggcgacaccggaaaggaccatcccgcaatagttcgccgtcgaagtccctttcatcttatgccgcctcccctcgaaattttttatcattatagcacccggccggctttttgccaatgccttagggcaattattttaattaagcggtaaatttatacaaagaaggggcgcttggcagcgccccttgccttaacagcagcattagcattcaaacgtctttgcctgttcaaattcatcctgaatctccttggagggcgccttggtcagcagagacactaccacgatggcgatgcagctgagtacaaaggccgggaacagctcgtaaatatccagccagccgcccaggggccgcagcagcatgttccagacaaagaccatgatgccgccggtgagcatacccgcgatggcgcccgcgcgattggtccgcttccagaacagcgagaagagcatgatcggcccgaaagtcgcgccaaagcccgcccaggcgaaggatacgaccttaaagataacgctattctcatccagcgcgatcagcatgccgataacggcgatcgccaacagaatgatacgcgaaaccgtcatgacctgtttatccgtggcgtcttttttcaaaacgccctggaaaatgtttttggagaaggccgacgcggcgatcagcaggtaactgtccgaagagctgatggtagccgccaggataccggccatgaccacgccgccgataagcggcggcagcaggtgcgtagaaagcacgataaacacgttttccgccccgccggccgtaagcagcgtgctctccgtggggaacagcgcccggccgatcaggccgatgcataccgccgcaaacagggagatcagtacccataccgtggcgatccgccgggatttgcgcagctcatccgccttgcggatagccataaagcgcagcagcacctgcgggatgccaaagtagcccaggccccaagacaacgtcgaaataatggtcagcagcccataatccccggccgcgccgaacagcggcgcccccgcctcggagatctgctgcacgcccgccgcgtccacctgcggcgttgcgataccgaaaaaggtaaagaatccatcgatagactgtgcgttttgcaccaccgcatccacgccgcccgcagcgatggttccggcgattaggatcgtagccagggcgccgatcatcaccacgccctgcatgaaatccgaaacgctctccgccagaaagccgcccaggaaggtataaaggattacgaacagcgcgccggccaccatcatccactgatagggcaggccaaacaggctgctgaacagcttgccgcacgtcacaaagcagctggccgcgtaaacggtgaagaataccagaataaacagcgccgcaatggtcatgatcacctttttgttctcgcggaaacggttgctgaagaagtccggaatggtaatggcattgcccgccagcgtagaatagcggcgcaggcgcttggctacaagcagccagttcaggtacgtgcccaccgccagaccgatcgccgtccatgccgcatcgctgatgccgcaccaatacgccacgcccggcaagcccatcagcagccagccgctcatgtccgaggcctccgcactcatggccgcgacccatggtcctaaagaccgtccgccgataaagtagtcctcactgctctggttcgcccgcttggcgaaaaagagcccaatcccgatcacgaccgccatataggcgaccatcgcgatcaaggtttgtatactgtcacccgtcatcgtacaacctcctcaattttaccgccgggcggcctcttatgcccccatccgcccaggcagcgctctcatccgtttattataattgattataaacaggttgacaatggctttatgtgcctcaacttggcacatgcgccataattcaggccaataccttagtgttatatttatatacatagtccatcagcaaagcaaatcagtattcagataagacgctaaaaaaagaacgccccgcataacaatgcggggcgttctttatatcagccgtttaagtacaagcttacagcgcttcctccagcgctacggccacggcaacggtggcgccaaccatagggttgttgcccatgccgatcaggcccatcatctctacgtgcgcgggcacagaggaggagccggcgaactgcgcatcggaatgcatgcggcccatggtatcggtcatgccgtaagaggcagggccggcggccacgttatccggatgcagcgtgcggcccgtgccgccgccggaagccacggagaagtactttttgccgtgctccacagcccacttcttataggtgccggccaccggatgctggaagcgggtggggttggtggagttaccggtgatggaaacgtccacgttctcgtggcgcataatggccacgccctcagaaacatcgtctgcgccgtaagcgcggaccttagccttatcgccattggagtacggcgtttctttgacgatcttcagctcgccggtagcgtaatcgtactcagtctgcacataggtaaagccgttgatgcgggaaatgatatacgccgcatccttgccaaggccgttgaggatgacctgcaaaggctctttgcggaccttattggcggtgcgggcgataccgatagcgccctcggcagcggcaaaggactcgtgcccggccaggaagcagaagcacttggtctcctcccgcagcagcatcgcgcccaggttgccatggccgcggcccacttcgcgctgatccgcaaccgagccggggatgcagaaagcctgcaggccgataccgatcagctcagcggcatccgccgcgtttttatagccttttttcagcgccacagccgcgcccagcgtataggcccaaatcgcgttctcaaaagcgataggctggatagagcggacaatcttgtccacatctacgcccttagccagcagggcgtcgcgcgcatcctccagcgaggaatagccgtattctttcaggcaagcttcgatcttgccgattcgacgttcataaccttcaaaggtagccattgattttaaccctccctgctaacaaattattggttgcgcggatcgatggtcttaaccgcttcgtcaaaacggccgtaggtgcctacgcacttgtcgtaagcttcctgcgcgcccacgcctttgcggatcatttccatcatgcgcccgaggtgcacgaacttgtagccgatgacctcgttattgctatccaggcccagctccagcacgtagccttcggccatttccagatagcgcacgcccttttcagcggtggagaacatggttcccacctgagagcgcaggcccttgcccagatcctccaggccggcgccgatgggcaggccgccctcggagaacgccgtctgcgtacggccgtagacgatctgcaagaacagctcgcgcatggccacgttgatcgcatcgcaaaccaggtcggtattcaaggcctccagaatcgtcttgcccggcagtacctcggcagccatagcggccgaatgcgtcatgcccgagcagcccagggtctccaccagggcctcctggatgatgccgtccttcacgttcagcgtcagcttgcaggtaccctgctgcggagcgcaccagccaacgccgtgcgtcaggccggagatatccttgacgtcataagctttgacccattttccctcttcaggaatcggtgccggtccatgcttggggcctttggccacacaacacatttcttccacttctttggaatattgcatctaaccttcctcccttgtcaatgattatcagcgataagttctgataaaaacccaaataattataccataaaacacatagcgatggaacaggttgctttgttaattttatcacaatttcgtatttggcgttaggccgccgcctcgacaaagggcggccggtttgctacaatatttaaaaagccttccactgggaaaggagccagagcgatgagccgtttaggagatcagattcatacgctgcgggtacaaaagggattggaccgcaaaaaaatagctaaaaaagccggtattgccgataagttcttgcaagaagtagaagagggccgccgcatcccgactgatgaacaggccgcgcgcattctgtctctcctgggggaaaagggcgatctgtccgaggcttttaccccggtggcggaggaatccactccgccggtccggcccgttgccaagcctaagccggccaagcctgccgcgcagcgcccctccctggcgcagcccaacgagcagtggaaccacgccctggccgggctgatgcaggatgtgcccatactcaacataaggggcgagcaggtcgccaagcgcacgcttgtgctggaaaagggcaagattcagggctttgatgccggcagcgtactctacctcaaaatgccggacgacagtctacgcgcactgggcatccacgagggcgatacgctctttatggtgcgggaatccgctctccgcgtagggacgatcgcctgggtgcgagcgggttcgcataacctgatcggcactgtggaaaagatcgccggcggctataaagtggggtcgaccgctcttgaaaacggcacttttaaaatgatagcccgggctatttctgcacagatccgcctgccataaaatagtaaaaagcaaggcgtatgattttcccgcacaggggcatcatacttaccggaaggcaacgaaggccgcagtttctatcagaaagcttgattagcctgttttgataggaatttggatcgtctcccttgccttttgacatagggcctgcgcgcagaaacatttctgcgcgcaggttttattttccccggataaatcttctcctagccgctgtccaggttgactttttcgcccaacccggcgataatgaatgttagcgattaaaaacctgcaatcccgcttcgctccgcgcgtccccggcgggattgtgtgcgcatatgatatggcaagtcggagggagaaaatatgaatctaaaatatgccgaccggttacaaaacttgtccggaaatgcaatccgggagatctttaagctgctggccagccccgagatcatctcgcttgcgggcggcaaccccgcgcctgagacctttccctgcgcggaagtggcccgcatcaccacaaagttgatggaggagcagggctcttccgtactgcagtatggcgcgaccgagggctggatgccgctacgccaggagatcgtgcgctggctgcccggcgtgggcatccatacggacgtggaccacgtgctgactaccaccggttcccagcaagggctggatctggtgtgcaaggccatggtcaatccgggcgatattgtattggtagaaaatcccacctttttaggtgcgctgcataccatgaagacctatcaggcccaattccgtccggtggaaaccgatgaggatgggctgatcccccaggctctggagcaggccttaaaggatggcaagcccaagttcttgtacatcatccccaccttccagaatcccagcggccgcacgctgacgctggaacggcgcaaggccatcgcccgcatcgctgcggagcatgaattgctggtggtggaggacgacccctaccgtgacctgcgctatgccggcgaggcactgcccagcatcgcttctttcgacgaggcgggctatgtgctgtacctggccagcttctccaagctgatctccccagggctgcgggtgggcgcggccattggcgcgcccgagctgatgcaaaagatgaccatcggcaagcagggtgcggacgtgcatacctccaatctctcgcaggccatcgtagctgagttcctgaaagagggactgcttgccccccatatcgcggagctgtgtaacgattaccgcgtgaagatggaggccatgctctcggccatttccgagaatttccccgcacaggtcaaggtcacccatccagagggcgggctgttcgtctgggctaccctgccgccgtacatcgataccacggcgctgctgaagaaggcgaccgagcacaacgtggcctttgttcccggcgcaggtttccactgcgatggcacggggaccaataccttccgtctgaacttctccatgcccagcgtagccaacatcaaaaaggccatcgcgattttgggcgaggtcatcagcgacgtgctgtaaggcagaccgggcgcacgccagggcagcaagacccgcgtgcgcccttattttatcgacaaggagggacgatgccctatgaataccgtcaccatcacccaggataattttaattcgctggccctggcccccggaaaaacggtgttactggacttctgggctccctggtgcgccccctgcaagatgcaggctcccgttttggaggcgctggcccaggagctgcccgacgtcaccgtcggcacgatcaatattgacgagcagcccgccttggcacagcgatttgctatccaaagcatccctaccctggtcattctcaaggatgggcagttccaccagtcgctggtaggcgttaccgttaaggcagagctgcgcgcggcgctggcactgtagaggaggagccgtatgcgcacgatcatcatgttcctctacttcgcagcgtacctcatctatgcactgcccgccatgtggcgcgctcaatccttggccaaacgaggcgatacagcaggggtagaccgcatcctgaatatccacgtgacccgttgggcccgcacgctgttgcgcctggcagggacgcgtgtaatcgtagaagggcaggaaaatctacctaaagagggtgcagtgctgtatgtcagcaatcaccagggagattttgacataccggtgctgcttacgcatttggatgggcctcacgccttcgtggcaaaaaaagagctgcttaaggttccgctggtcaagtactggatgagccttttgcagtgcgtttttctggatcgggatcatccccgtcaggcgctggcatccattctcaagagcgtagataccctcaaaggcggccattcggtcatcatattccccgaggggacgcgcagccgcggccgcaagatgggcgagtttaagttcggggcgatgaagatcgcccagcgcgcccaagttcccatcattcccctggcggtagatggctccttccgcgtgatggagcagcagggcatctgggtcaagcccgctacagtgcggctgaaaattctcccgccactggataccgcgggcctgacgcgcgaggacgccgcagccatgaatgatcgcatctatcagctgatcgctgaagcgctgcaggagaattgttaaagcaaaaagcgcatttagagcggacgggacaccccgtccgtttttttatttcctatagcattccctccctcatagctttccattgacattcgctctaaagttgcatataatgttgcaataacgttttagcttgcgtaatttgcatttttggggggtaaactgtggaacttttttggacctgcctgctgaccattgccgtagccgtggccggcggctttctttttaccaagatcaaagccccggcgccctttatggtggggtcgatgttcgccgtggcggcgctcagcgtctgcacggggctggcctacttccccgacgcgctgcgccccgtcacacaatcggtagccggttcttttatcgcgctgagcatccagcccgaaaatgtcaaggagcttagaagcgtcatcaagccctatttcgtcatggtcccggggatgttgatcatcaatatcctgttggggctctccatgtactatttttgcggaatggatatttctacagcccttttctcctccgtgcccggcggcatcatggatatctccctgatctgcgcggatatgggcgccaacacctcgcaggtcgccatcatgcagacggcccggctgctctttgtcatgctgctatttccgcccatgctcaaaacgctggccaaccggactttgaaaaagcagcaggccgaaggccaagctgccgcgcaggatgtacctgcatcccagcctgacgctgtggctgaagctatcccggttgaaaaatacgcgacccttacccgccgccagcaggtgctatatacctttattacgctggccatcggcggcgtgggcggctttatcgggtataaactggcgattcccgcggggacaatgaccttttccctgctctttgccgcggcctttaacctgatcacccgccgggcctatatgccggtattcgtgcgtcaggctgcgcaggtcggctcgggcgccctgatcggcgcaggcctgacgctggctgatatcctggccatgcggaccatcatcgtcccggccattattttgatctttggctatgttatcatgaatctgggattggggtacatcatctataaggccaaaatgctggatctaaccaccgcgctttttgccaccacacccgcaggggcctcagatatggcgttgatcgccgacgagttgggcgccagcgggcctaaggtctcgatcctgcacattgcgcggatcatcaccgtcgtggcccttttcccctccgtcatcgccttggtcatcggcgcggtaacctgatatgggcgagatgtggatgcagaaccttctgccactgtattacggctttatcagcctgctgggtttcagcctgtgcggttatgataagatggccgccgtgcggaaccgccgccgcatcccggaaagacggctgctggcgctctgtgcgctgggcgcctgcctgggttttggcgcggggatgctgcttttccgccataagatccgtaaaaagagatttaccctttccatgccgctgttcatcctgctgcatttaatactggtgtggattttgctcaaatattgaccgcgtgtcagcaccgccgggccttgtaaacaggccgccggcggtgttttcttttagggcgtggctcccttcattgcaatgggcgaggaaatcttctataatgtaatttgtaccttatagagaggggattttgcatttggctaaaatcatatccgtcgccaaccaaaaaggcggcgtgggcaagacgacgaccacagtcaacctggcagcctgcctggcaaagcagggccagcgggttttaatcgtagatatcgacccgcagggtaacgcgaccagcggcttgggggtggacaaacaccaacaacgcgcttcgatctatgaggtgctggtcggcgaggccgacagccccgacgccgtgatccacacgcaagtccaaaatctagaccttttgccctcctccatcgcccttgcgggtgccgaggtggaaatggtctccatgatggcgcgggaatacgtgctccagcgggcattgagcggcctttctgatcgctttgattttattttaatggattgtcctccgtcgttggggctgttaaccgtgaacgcactggccgcgtcggattgtgtattggtgcccatacaatgcgaattttacgcccttgaagggctgacgcagctgatgaacagcgtacatctggtccgcaagcacttgaatccgcatctggagttgctgggcgtggtgctgaccatgttcgatacccgcaccaacctttccagccaggtttctgaagaagtgcgccgtttcttcgccgaaaaggtgtttgagaccgtcattccccgcaatattcgcctggcagaagcgcccagctatggccagccgatcctgcaatacgacgcccgctgccccggcgcggaggcctacctggccttgagcgacgaggtgcttgcccgggtaaaaggaggaaagtaaatgagtgcaaaaaagagcggtggcctgggccgtggcctgggcgccctgatcgccacgtcggatagcggtctgcccgactgggcacaggccgagaagcaggccgaaacagcgcctgaacagccctccgccagcggcggcatacaggagatccccctgcggttgatcgaccccaacccggatcagccgcggcagaccttcgatccggaagcgctaaaggttttggccgcctccattaagacacacggtgtactgcaacccatccttttggccccacaggagaaagggcgctaccgcatcattgccggcgaacggcgttggcgggccgccaaatcggcccggctcaaaaccatccctgccctggtgcgagaggtggagctgcgggatcaaatggaactagcgctggtggagaaccttcagcggcaggacttgaatcccattgaagaagcggtttccattcgggctttgatggatgaattctcccttacccaggaggccgtggcggagcggatcggccgcagccggcccgcagtagccaactgcctgcggctgctggctttgccagccccgatccagcagatgctcaaggacggccgtctaaatcccggacaggcccggccgctggtggcgctggacgatagcaaactgcaattggagctggcggaacagatcgccggcaaagagctttccgcccggcaggcggagcaactggtcaaagcagcgaccaagccgccaaagccggcgtccgaaaccagcattgcgcagtcgcaggacttggcccttgtgcaggagaccatgcgtcgggcctttggcacacgcattgagatcaagggcacaactgacaagggaaagatccagttagaatactattcccgcgaggatctggaacgcatttacgaattagccgcttcgctggggcccaagggcgatgactaagcgacatcgctttctataaataaagcggactgtttcacgtgaaacagtccgcttttctttgtcttttgttttcccctcttcaccggcgctttttgtgccgctacccatttggaagccctattgcataccccttcttgtttcacgtgaaacatacactatctatccattgtgtccgccgatcgccatgatcttattgcccgcacccgttgcgagctgctgcgtccccttttccccgcgatttttagggatacggatatgtacttcccagaattcttcactggcggattcttcatattggatattcgcccccaccacgcgcatatccttggccacccgccggaaggtattgagcagcaggcgggagtcccgcatagcccgttttaccctgggtttgacgttacccaagtcttcaccgcgttggcttcggtccgcatatagcttttgcaaggtcatctccaccaactcttccgctgcccgcaccgtcatatcccggctgatgaattgttccagtagcttctcctgcaccttttcatcgtggatacgcagcagtgcgcgggcgtgacgctcgctcagggtagattcagccagcctccggcgaatcgcgggagagagttttaaaaggcgcagcttgttcgccacggcggattgcgtcttgcccatccgccgggccagttcctcttgggtgaagccgtgttcgttaatcaggttataatacccctccgcttcctcaaaaaagctcaaattctcgcgctgtaggttttccaccagtgccaccatggccgaatcctgatcgttggccggcagcacgatagcgtcgatcctccgtatgcccgccatccggcaggcgcgcaggcgccgttcgcccgcaatcaactcgtaataaggcccgccgagctttcgcacgctaataggctgaatcaaccctacctgccggatcgactcgcataggtcctgcagcgattcatccgggaacacctttcgcggctgatagggattgggcaatatacagtttaccgggatggaggtaagcatggtgggcgtaggataccccccttgcgggtgagaattggatgggttttttatcgtaaacatagagaaacctcctgcactttgttatgcaaaaggttctataatatttctctatttcctgcaatttcagctaaatttgtggataaaaatcgttcttcacaattcgacagtatttttactcttattttctctatattcctcctgttttctttatatttcgacagttttcgcaattacaaaggcttgcgttttgcctcccccggtcggcgggggaagcgctttgtagtgggttgttgtttgctgcagaggatcagccggtgggcctctccccccgggaccgggagcggaatgatgtgctctacctttccgcccagcgcctgcagtgcgcgggcggaggactctacctcgccaggcgcctcccctttcaggcaaagtgcgcgcccgcccaccttgcaaaggggcagcagccattctaccaatgtgggcagtgccgccaccgcgcgcgccgtcacgatatcaaacgcttcccgcagcgggctatggagcgaggccacctcttccgcgcggccatgcgcaaactgaaccctttctatcccaagcgctgtgcagacttcctctaaaaaattcagccgcttttgcagcgcgtcgttcagcgtcagctggatatccggccgcatgattttaagcgcgattcccggaaagcctgccccgctgcccacgtcgatcacccttgcgccctccgggatcagcccttcgatcgttaagggcatcacgctatctaaaaaatgcagggcggcgatcccctccgcgtcgacaatgcgggtcaggttgatccgcacattccactctagaagcaggccggcataggtacaaaactgtttttgctgccctgctgtgagcgcaagtcctctctcctgggcgaggatgctcagccgctgcgccgcctgcgcggcaacttccaaatggttatttccttccattactttaccgttcctcctcccgcagccgcctgcgccgctccagctcgatcatcaccaccgaaatatccgccggagagaccccgctgatccggctggcctgccccagcgtgcgcgggcgcatgcggtttagcttctcccgggcctccagtcttagtccggcgatctgcgcgtagtccagctcctccggcagggccatgccctccagccttttaaattcggcgatctgcgccgcttggcgcttgatgtatccctcatagcgcagcccaatctctacctgctgagccgcctcccgggaaatctccggcagctgcgggcaaagttcccgcacgtccgcatattcccactgagggcggcgcagcagagcgtccgcaccgatcccgttttgcggcggcgcaaggccctctttctccgccatggcccggtttaaagccgcatctgccggcagcgtcacccgccccagggccgccagcgccgtttctacctgctcgcgcttgcgcatcatttgatcgtaccgcgcgtcttctaccagccccacctggcgccccagcgccgtcagccgcaggtccgcattatcctgacgaagatgcaaccggtactcggcccgcgaggtcatcatacggtagggctccttggtgccttttgttaccagatcgtccaccaataccccggcataggccgtagcccgatccaaaatcaggggcggctcgccctttacgtattgggccgcgttgatgcccgccagtattccctgggccgcagcttcctcatagccggaggagccgttaatctgccccgcaaaaaacagccccggcagcttacgcgcctgcaaatccggccccagctgggtcggatcgatacaatcgtactcaatggcataagccgggcgcataatctttacattttccaggcccgccatggagcgcagcatcttgacctgtaccgcttccggcaggctggtggacatgccctgtacgtacatttccttagtggtcaacccctccggttcaataaacacttggtgacgatctttatccttaaagcgcaccaccttatcctcgatggatggacagtaccgcggcccgatcccctccaccagcccggagtacatggctgaaaggtgcagattctccaaaataatcttatgggtctcggggttggtataggtcaggtagcagggcacctgctcgcgctttatctccggcgtcataaaggaaaagggcaggatatgcgcatccccctcctgccgagccatgacgctaaagtctacgctgtcccgatgcacccgggcgggcgtgccggtctttaagcgctgcagcgcaaacccgttctccagcagcgaggcggaaaaggcgttggccggaaacatgccgttaggcccgctggcaaacgcccggtcgccgatcaatacgcggcccttgaggtaaacgccagtagccagcaccgccgcgcggcagcccagcaccgcgcccccgcaggtctcgatgccggatacccgcccgccctcggtcaaaatgcgcgtcgcctccgcctggacgatatccagccccgcctgatcctccagcacggccttcatccgctcgtgataccggcgcttatccacctgcgcccgcagggagtgcaccgccggccctttagcagtattgagcaggcggctctggatcagcgtggcatccgcgttcaggcccatctcaccgcccagcgcatcgatctcccgcaccaggtgccccttggccgtgccgccgatattggggttgcaggccatcatcgcgatgccgtctaggttcagcgccaataccgcggttttaagccccagtcgcgcgctggccaacgcggcctcgcacccggcgtgccccgcgcctaccaccacgatatcgtaatctcccgccctgtaacgcatatttcctcctttaagataacccggttatttgcccaggcaaaacttctcaaagatcctgtcgataatctgctcatgtagcgtatggccggtgatctcacccaccgccgtaaaggcgtcccgcagatcgatctccacaaaatccgggctttgtccgctccgggcggaatcctccgcccgttccagcgccgaaagtgcctgatgcatggccgcagcctggcgggcgttggtcagccgggcgccaccagcttcctcccagtttccaccggtcaaccgggcaaagatgcgttctttgacctgttccagtcccgcacctgtcagcgcgctgatggacaacacctccgcctggggtagccagcgctccagcacagctgtgttaaactgccgctctaagtcctgtttattggtcaggatcagcacggccttatcccgcagggcttcagcaagctggcggtcttcttctcccgcgcactgcgagccgtccactacccaaagggccaggtcgctctgttccagctccgcccgcgcccgggcaatgccaatgcgctccaccgcatccccctgttggcgcagccccgccgtatccaccagatggatgggcagcccgtttaagatcaacgtttcctccagcgtatcccgcgtggtgcccggaatatccgttacgatggcgcggtccgcctccagcagggcgttaagcagcgagcttttccccgcattgggacgccctacaatggctacccgcgcaccctcccgcagcagccggccctgggagaactgcgccagcagcgcgccgccctgttcccgcaaaaggccgatgcgcgccgccgcgccggagagggtctcctcctccacatcctcctccgggtagtccagggccacctccagctgggccatcaggtccgtcagggcgtcttgcatggcctctatctcgccccgtaaccggccggagagctggtctgccgcctgggacagggcccgctcgctctgcgcgccgatcaaatccatcacggcctcagcctgggaaagatccatccgcccgtttaaaaaggcccgcttggtgaattctccgggctgggccagcgccgcgccgttagacaggcaccgttccaataccctgcgcaccgccacactgcccccatggcattggatctcgcacacatcctccccggtataggagtgcggcgcagggaaatagaccgccagcgcttcgtccaccaatcctttctcatccgctacgctgccgtaagtcatacgcctggccaccaagggatagccgcccttttgcggcctaaagactttctccagcacggccagcgcttccgggcccgaaatgcgcacgatgcccacgccaccctgtcccggcggcgtagccggcgccgcgatcgttcttgccatcttctcctccaaaatttcttactaaagcttccctattatagcacgtctttcccctttgctaaaagagagcggcaacaaaaagaggcggcggaaaatccttccgccaccccttttaagtacttattaacctaaaatgcgcacttctgatccagataagcctccagctcatccatgggcatgcgtacctgctccatggtatcgcggtcgcgcacggtcacgcagttatcttcggcggtatcaaagtccaccgtgatacagaacggcgtgcccgcctcgtcctggcggcggtagcgcttgccgatagagccggcgtcatcataatccaccgcaaagcgcttggccaatttggcctgcagcgcctgtgcgctctcccccagcttcttttgcaagggcagtaccgccgccttaaagggcgcaatggccgggtggaagtgcatcaccgtgcgcacatcgccgccctccagctgctcctcctcgtaggcgttgcttaagaaagccagcaccacgcgatccagtcccagggagggctccacgcagtaggggatatatttctcattggtcaccgggtcctgatactcaaaattctctccggagtgctgggcatgctgctttaagtcgaagtccgtccggtcggccacgccccacagctccccccagccaaaggggaagaggaactcaaagtccgtggtggccttgctgtagtggctcagctcctcggggtcgtgggcgcgcatacgcaggttctcctctttaatgcccagggagagcagccatttgcggcagaaatccacccagtagttgaaccactccatatcctcccccggtttgcagaagaactccagctccatctgctcaaactcccgggtgcggaaggtgaagttgcccggcgtgatctcgttgcggaaggacttacccacctggcagatgccaaacggcacctttttgcgggtggtgcgctgcacgtttttgaagttgacgaagatgccttgcgcggtctcagggcgcaggtagatctcgttttttgcatcctccgtcacgccttgaaaggtcttaaacattaaattgaacttgcggataggggtaaaatccgccttgccgcactccgggcagacgatgccccgttcggcaatgaactgctccaactgttcgttagaccagccctcgatgtgcagttcctcacccttttcggccagatagtcctccaccagcttatccgcgcggaagcgcgctttacaggctttgcaatccatcagcgggtcggaaaaaccgcccacatggcccgaggctacccaggtctgcggattcatcaaaatcgccgcgttcaaccccacgttcatcggcgtttcgcgcacaaatttttgccaccaggcgtcccgcacgttgtttttcagctcacatcccagcggtccataatcccaagtgttggccaggccgccgtagatctccgagcctgggaagataaagccgcgccctttgcacagcgccaccagtttttccatttgggatactgcctttgccatatccatactcctcctttataaaaagccataaaaaaacgccttcatcccctaaaacaagggacgaaagctatccttccgcggttccaccctttttggcgcctgcttttcaagcgccctcttttcaaacgggccgcgctccggaggcgcccgtggccgcctgcccgccgggcttccacccaccccggctcgctacaaaagcagtttagcgcttgccactttaactccatcgccgcgcgatatttcttcttcttatcatagcggattttgggtagttgtcaagagcgcggcggaaaaacttgcatttttgtgctcacatcctttataatagaacggccggagatgcccggaaggcacgggcataatggcaaatgagacgagtttgagaggagtttttcacatgtctaaaaagaaggttcccggacgcatttatttaactgaagaccagctgcccaaagcctggtacaatatgcaggcggatatgcccaatcccgtggcgccgccgctcaatccttctacgcataaacctgcctccggggccgattttgaagcgattttccccaaggatctgatcgagcaggagatgacgctggagcggtatatcgacatccccgatgaagtgatgaagatgtacaagctgatgcggccctccccgctgatccgcgcctattgcctggaagaagcgctgggcacccctgcgcacatttattataagtacgaggggaataacgcctcgggcagccacaagctcaacagcgcggtgccgcaagcctattataataagatcgccgggattaaaaagctgactacggagaccggcgccggccagtggggtaccgccctttccatcgcctgcggcttttacgatatggcctgcgaggtctatatggtgcgggtaagttacgatcaaaaaccctatcgccgtgtgatcatggaaacctatggcggctcggtcatccccagccccagtccttctaccgaaagcggccgacgcatcctgcgcgagcatcccgattcccgcggctcgctggccatcgccatcgccgaggcggtggaggtagcggccgggcgcagcgataccaactatgccctgggcagcgtgctcaaccacgtgctgctgcaccagaccattatcggccttgaggcacaaaagcagtttgagatcgccgacgagtatcccgatatcgtcatcggctgctgcggcggcggttccaacctgggcggcatcgccttccccttcatgcgggataagatcgtaaaccatcaggatatccgcatcattggcgtggaacctgcggcctgtcccagcctgaccaagggcaaattagcttacgactttggcgacgcctccggttttacgccgctgatgaagatgtataccctgggccacgactttgtgcccagcggcatccacgccggcggattgcggtatcacggctgctcgcccatcatcagcaagctgcatgaggacgggctgatggaagccacctcagtttcccaaagcgaggtgttcgccgcggccaagttgttcgccaagcacgaggcgctgctgccggccccggagagctcccacgctatcgccgtggccattcaggaggccttaaagtgcaaggagaccggggaggaaaaggtcatcctctttaacttaagcggcaacggctatctggacctggcggcctacgataattacaatcacggcaagatcgtggatgcagaatacaccgacgaaatgctggccgagggactcaaaaccgttcccgagctgtaaggatattcgattgataagcaaaagcaccttccaattggaaggtgcttttttaacaagtgctccttttctttcgggcttacgcttacttcccgcttttaacagtgcgaagtatcctggtgtcacatatcttcccgctctttaaacagctgatatggctcaatatccagaatatcacaaagcctaaatagaatatctagcgacggcgctttatgtacatttttagcctcaatatggctgatatgtactctcgaaatattagccttcagcgcaaggccttcctgcgtcaaatgctttttctttcggtaataggctatattctcgccgatgatattgtaatatcgcgtataatttcccacatattctcccatgccttcatgctaattgaaaattaacaacatattgctcgctataagctagcaataatggtatgatgaggatggggtgtttacattggatttatacaaagaaatcctcatcaacattttagcgcagcaggaaattcacattacctttccctcacttcaggacgatttaaatgctctggtcgaaatgcgatgtttgaccaccctgcgggagattcgcagtgttctggatgatcctgcgcttgacgatgaaacctgttttcaaagaatcgaaaagatcgccgccatctttgaaaaactgggcagcgacggcgggatgcgccacgactttggatagttgcactatgcggcagcctctccccaatgtcgcggcaatcaggccgcctaagcgccctgctatccgctgtctgccagacgcatcttgcgcaggatgcgtccctccatacgggagacctgtacctgcgatacgcccaggatcagcccggtttccgcctgcgtcttttcctcaaaatagcgcagaaagatcagcttgcgctcccttggctccagctgctctaacaattcctgcagccagatgcggtccaccgtatgctcgccatccgcccgctcgtcggcgatgcggtcgatgcgggcttgggactgtccatccttgcccagttcctgctcttcatccagcgaggccaccgggcgcgccgcgtccagcgccaggatcacatcgccctgatccatcccgctttcgctcgccagctccgcaatggtggggttgcgcccccattcgcttgccaggcgctgttccagcagccggagtttttgcgcgttttccttgagcccccggctgactttgacctgtccatcgtcccgcaaaaagcgcttgatctcccccatgatcagcggtaccgcataggtggaaaactgcacgtcaaaattcaggtcaaagcgtttgatcgccttgaccaggcccacacagcccacctgatatagatcctcgtattcggcgccccgcccgataaagcgcttggccacgctggctaccaacctggcgtgggcctcggccagcgcctccatggccgcgctgtcgcccgcgcgtgcctgggcgatccacgcgcgggtctgcttcagatcgggcgcccgtcccgcacccatagcctacacctgtacgatggggtcacgcgcctcgaagcggcgcagcatgacgatgcgggttccttttcccggtagggaatggacctctacctcgtccataaaattttccatcacggtaaagcccatgccgctgcgctccagctcgggtttggaggtataaaagggcatacgggcctgctccacatccgctatgccccgtccgtcatcttcgatctcgatcttgatgccgtcctcaaatagcaaggcgcttaagtgtatggtgccggggccgttctcataaccatggatgatggcgttggtcaccgcctcgcttaccgcggtcttcacatccgccagttcttcgatcgtggggttgagttgggctgcaaaggctgccaccacaacccgggcgaacgcctcgttttctgaaaggctggcaaaatccagccgcatttcattttttatctgcataatcccttcatcccctttagttcactttgtcgatgatctggtacacgcccgacagctccaatacccggtccacctgtgatggcacgccccgcacggccatatgtccgcctttccggtgtaccagcttataccggccgatcaaaacgccgatgccggaggaatccataaaggtcaatttactcagatccaaaatcacgttttgtacatttcggcccgccaacagcgcgtccagccgctcccgcgtttccactgcggtatggtgatccagctcgccctgcagcgtgacttccagggtcttgccgttatagcggtgtgctatgatcatatacatgcctcccttttgtgtcccgtttaattccatttgctcgccccaaaaccctttggtgaaacggcggcgttcttctcccttttcatcgaattttgccatctctgatctttttgccgccagtgtgatagaatctttgcttcctgggcagattagtaacgtgttatatccaccaaaaggaggtctttttccatgtctgccccgtccaaaatccgccgcaaaagaaggtggccttatgtactgctcagtctggcgctgattttcatcgttggcggcgtttgggcgtggtttgcgctggatgtcggctcctggggcgatctggatgtgaccaaacttgagaacctccagcagaccaccctggtctatgatgaagatggaaccatggtcacctctctgcacggcgctgaaaaccgcgtgaagatacccttgtccgaggtgccccagcacgtacgcaatgccttcttagccgcggaggacgtgcgcttttacgatcataaggggatcgatatcaagcgcatcttcggcgcgctctgggcggatatcaaatccggctcgctggaccagggcgcctctaccctgacccagcagctgatcaagctcagccatttaagccgggaaaagacctttgcccgcaaggcgcaggaggctgtactggccatggagctggagcggcgctactccaaggacgagatttttgagatgtatctcaattttgtctacttcggcggcggcgcctatggcatcgaggcagccgcctaccgctattttgataagcctgccagcgcgcttaccctctccgagggggcgcttttggccggtattgtcaaaagccccagcaattatgccccgcatttgaacctggaaaaatccaccgaacggcgcaatctgatccttggcctaatggtagattatggctttatcgatcaggcgcaggccgacgcagccagcgccgagccggtcgatctgcacgagcatgagaacgacgccagctatccttatggtttttacgtggatgaggtcatccgggaggctaccggcatcctgggcatctcttcagaggaactgctttcgggcggctaccgcatccatactgcgctggataccgaattgcaggccacttgtgaagcgctgctggccgacgacagcctcttccccgaggcggcagaagatggggtcaagccccagggcgcgttagttgtggtacgcgcgcaggatggcgccgtagccgcggtagccggcgggcgcagccatgatacccagctggccctgaaccgggcgacgcagcagccacgccagcccggttctactttcaaacccatctttgtttacgccccggctgtcgagcagtttggctacctgcccacccgtatcgtggacgattcgcccggcgattttaacggctacgcgcccaaaaatttcggggataaatactatggactggtgcccatgcgctttgccatcgccaactcgctcaacctgcccgccgtgcgcaccctacaggagatcggcatcgatacgggcctcagctacgcccgctccctggggatcgacctgcccgatgcggacgccaccctctccagcgccctgggcgggttgaccactggcgtaaccccattacagctggcccacgcttatatcccctttgcccggcagggccaactggtggataccggctttatcttgagcataaaggatagcaccggtgcgaccatatatgaaaagccctccgcatccactacggtcctttcctctcaaagcgcctttttgctcagcgatatgatgcactccaccgtgacggacggtacgggcaagcaactgcaaaaagcgggtgtacccttaagtgccaagaccggcaccgtcggctttggcgacggcaccatccgcgatgcttggatggcagcctataacgccgagtacatcgccgtgggatggatgggatacgatgtagtggacgcacagcacaccatgcccgcctccctcacaggcggaaaggcgatctctccctttttattaaaggtatttcaatccctctatccggatgggaacggcccggcgtttgaagtacccgatgggttggtcaaggtggagatcgacgcggatgccctggaaaaataccatcaggtcctgctgcccgcatcctcctccgcccgcaccctcacggagtatttccccgcacataaggtgcccacccgaaaagctgaagctgtagccccgaaagcgccgaccgatctgaccgtgactgaacttgaacccgggcgggtcctgctcaagtttacggccctggaagcggacgtgcgctaccggatctaccgccgctccgaagggcaggaggctatcgagatcggctcgctctcgggcagcgccggacagatgctatcttataacgatacgctcaacatcatcggccccaccgggtattatgtcgtgcccgagcgggagggtaaaagcggcccgccctcggctacggttaccatcggcggcgagatggagccctctcccagccccagcgctgatgcgacccccagcgcgtcgccttcttccacgccggaggtcacgccttcaccctcgccatcgcctccggatccacttgcgcccatctttcctgaggactgacgctttatcgacaggattccccaagggactggaaaatattcacaaaaaacgcgtttattaaaacgcgttttttgcattttgttgacttctctttttttgccttctacaataaaaaaataatgaagttatttttcgtaaggtttgaagtaaagaaaggacatggagagctaatggaaattactatacgggcatataccgccgcggatacttccgccgcgattttaatctggaaccaggtggtcgaagcgggcgtcgccttcccccagatggaaacgctgacggagcaaagcggcgccgccttttttgccggccaatcctttaccggcatcgcgcaggacggaaagaccggggaggtcgtagggctttatattctccatcccaataatgtgggccgctgtgggcatatctgcaatgccagctatgccgtaaaagaggggctgcgcggccagcatatcggcgaaaagctggtgcgccattgtatggccaagggcaaagcgttgggctttaggatcttgcagttcaatgccgtcgtcaaaagcaatgcttccgcattgcatctctatcaaaaattaggttttacgcccttgggcaccatcccgggcggatttttgatgaaagacgggcattatgaggatatcgttccgcattatatcacactataggaccagaccggtaaaattacttttccgtaagctagctttgtcataaattttaggtcctatttaacttatagattgggggatgagtcatggcttttgcgcttaaatatatcgagttaaaaaccggttatgctgataatggtcctgcatggatcggtaaagttaaattatccaggacgggcacgaccctgtattttaatgaccatgcttttcaaaaatgtaatggtatttccggtaattttgtggatatagaatccagcgaagaatattggatatccggagtcaagaaagatgggcaagaccgccactgggcaggacatggcaaggtaatgatcgaccaaaaaatcgtggacgactatttaaaattcatcggccaggaaaagttagatctttcacaatataccgtaattcctatagaagatgtatttcccattgaaaggattacccgactcctgaaccattagtaccgccacattttttaacacaatataatacaaaaagccgcgctgatatatcatcagcgcggctttttgtaaatgctctactttaactcgataaccacccggcggttgggttcttctccctcgctgcgggtcgtcacatatgcgttgccctgaagcgccgcgtgcagaatccgccgctcataggggttcatcggctcaaggacgacgcgccggccggtccggcgggccttggaggccattttctccgccagctctttaagcgtctgttcccgcttggcgcggtaattctcagtgtccaccgttacgcggatatattctttgctgtccttattgaccactaaactggtcagatactggatggcgttcagcgtttctccccgatggccgatcaggatacccatcccatcgccttcgatatccacagccagcgtgccatctttttccaccgccgttacctgggcattgacattcatccgggaggtcatctccttgatgaattctacagcggcgcgctcgggcgtgttcttttcggtcacccgcacacgggcaggcttgttgccgatcaggccgaacagacccttagccggctcttccaaaacttcaatttctacagcgctgcgcggcaatgtccattcagaaagtacttgctccaccgcttcgtctactgtacgtcccgtagcttcttgcgatctcatgcattaaccccccttggtttgacggacgataaacttgccatcgtaaatcttgttggtgatcagcatctgcgtcatagagaacaggttgctaaatacccagtacagcgagaacgccgacgttgaactcgagcagatccagatggacatgatgggcataaagtacagcatcatggcactggaacctttcgagctggaatccgtcgaaggcatctgcggcatcagaaatttcgcctggataaactgagtaccgccggcgatgatcggcaggatgaaaagcccgttcatctgcgtttcgtacgaggccaatagctcgcccatctgcccggtgccgctgagcagtacatcgctgatagcctgtatctgttcgggctccgtagttcccagcagcctggcaaaggtctcggccgaaggcaagatggtattagacgcgccgaacagggaatccggctgccatacgttttgaatccataaaaatttcgactggttcatcagggtggagaacgcttcaaagttcccctcctcaatataatggtacatgttcagcatcatctggtcgccgtaattgcgcagcacgcccagcatgatcatcaggatgggcagcgagatcagcagcggcaaacatccggaaaaggggctgaccccttcttgccggtagagttccaccatcttttgccccagcttgtccttatcattggcgtacttttgctgcaatttagcgatcttgggctgtatcgcgctcatgcggcgcgaagtcttgcgctgttttaaatccagcggcagcgtaagcaatttaataaatatcgtgaagatgataacggtaataccgtaattttgaacgatcccgttaatccactccagggccggcatcaataccggcgtcaaacctaagtccaatcaagtatcctcctacatgcgtcctatcagggtagcggatcgtacccccctgggaaaagcggattgcaacgggcgatgcgcttgacgatcagccaaagcgcccgcggccaggaatactttttcagcgcctgcagcgcatattctgagcaggtaggataaaaccggcaactgggcggaaagcagggagaaatgtatttacggtaccccctcaccatcgcctctaataactttgtcatcagttagcctctatccggcgctttttggggcccctccggcccgcgcttatggcgccgcgcgccgtttcccgtatccgggccatccgttaaaaacaatgcagccttatgcaataagtatcgcatggatcgcctcagctcactataggttgcgccggcagcggtatttcttgcgataaacacaaggcaatatccctttttaagttccgggatgcacaagcgaagattttcgcgcatcagacgtttgacccggttgcgcgttacgctgttgcccaccttgcggctaacggaaaaaccacacagaaactgttctccccgcgcgcgctgtacaatcaataccatatgcttggcgggataagacttgcccctgcggtatacccgctgaaaatcccggttcttttttaagcgatactttttttgcacttttaccctttacgccgctttctttccgcttccttcgtcgacaggaaccgatttagccgcacctaataaatatgacgcacacacccaagggcacgtacatcatatccattaaactgctatatcgatcctttaatccccattaagccgataatttcttgcggccacgggtacggcggcgggccaatacgttacggccgtttttggttttcatgcgcgcgcggaaaccgtgaaccttagagcgctggcgctttttaggctgataagtctgaagcattttacatttctcctttaaaattggtatttatgaatcgggcccttttggtctaaaacccaacagacccgctcaaagggcatagttcaccttttgacagaggcactgttgtattatatctaaagcgcgcgggcctgtcaacttgcgccaaagaagtttatctaaaccggtaatacgctcaaaatattgctaaatgcgccagaggatttcacccttgaaggattgatttaagtttgttatgatatgaatagatttttgtagaaataattttgtccacagtttgtgtaaaacttgtggataaataggtggatttttcaccggatgccctttaatacaggtttttaaggtaaaaagggcggaaatatagtaaatcattccgggctgacttggggataactcagtccggattttttgcccccaacccagaccgagatggggcaagcgagcatagtaatggaggaaaagcatggatcagctgacgaagatatgggagcaagcccttgaactgatgaagccggagttgacagagatcagctttaacacctggatccgcccgctgcggcccatctctttacaggaagaccgcctggttttggagacgcactccggctttaaccgcggcatgctcgaatcccgttattctttcctgatccagaatgcggtgcgccagatcaccggcaaaaactgtgaaatttcctttatattgcctgaagaggctgccgccgcgcaggagcttaaaaaagagcaggcgccggcgcccgccgttcaaaaagaagaagtttcccagctcaaccccaaatatacctttgataccttcgttatcggcaattctaaccggtttgcgcacgccgcggccctggcagttgccgaggttccggcgcaggcctataatccgcttttcatctatgggggtgtggggcttggtaaaacgcacttgatgcacgctatcggccattacatccgctcgcagaaccctgagatgaaaatcctttacgtgaccagtgaaaaattcacaaatgagctgatcactgccatacagaccaataaaaacgaagaattccgccgccgctatcgcagcgtggatgtgctgctcatcgacgatatccagtttatcgccgggaaagaatccacaacggaggaattcttccatacctttaacgccctgcatgatgccaataagcagatcattatctccagcgataagcagccccgggagatccctacattagaggagcggctgcgttcccgctttgaatggggcttgattgccgatattcaaccgccggatcttgaaacgcgtatcgcgatcctgcgcaaaaaggcgcatgtagacgatattcaggtggaagacgatgtgcttttgcatatcgcccacaaggtggaatccaatattcgtgaattagagggggcgctgacccgagtggtggcctacgcctccctttccggccggccactgaccgtggaagtggccgaagaggcgctgcgggatatcctgcccaacaaggtgcaaaggaccatcaatccccagctgatccagcgcaaggttggcgaatatttctccatccggccggaggattttctatccaagcgccgcaatcaggagatcgccctgccccgacaatacgctatgtatctgtgccgggagatgaccgatctttccctgccgcgcatcggcgaggcctttggcggccgggatcataccacggtcatccacgcctgcgataagatcacccgggccatgcaggtggatatgcaggtgcgcaatattattaatgaactcaagcgccagattacggaaggatgatccatccacaatctgcacagctgccaaaggggataacgtgtggataaaaaggaccaatccctcttatccaccttctttgggaatggcggggataacttttgccacttacaaacaggttatgctatccacctattcccagaaaatagcggtgttgggagcttttccacatatacacacgtactacggcaacgactacgccttaatttattatctcttcctacacggtgaggggtaaaattccacagcaaaggcaaaaggaggacttacatgattctacatatcgaaaaagaagaattaatctttggcatcaacaccgtccaaagggcgatggctgtaaaatccacccttccggttttggaaggcatttatatttgtgcagatgccaaaggattgcagctaatctgtaccgatctttctctgggcatccaaacttttttggcttgtgatattgaagaggagggcaaagtcgtcctacccgggcggttatttgccgagatcgtacgcaaactgccggatggagatgtagatatcaccatcgacgataatctgaatgtgaccattcagtgtatgggttcgcgcaccaaaatgaagggattagaccctgagaccttcccggatctggccgaggtgtccgacgcctccagctttaccatcgcccagccggtgttaaaggatatgatccgccagacgatcttcgcggtggctaccgatgaaacccgtcccatcctgaccggcgcgttgctggagattcaacagaacaacctgacgatggttgcgctggacggctaccgtttggccctgcgcaaagaggctttgagcgcgcccagcgaggaaaagcagatcgtcatccccggcaaatctctaagcgagatcgggaaactgttggatgacgatggagatgatgtccatatcatgtcacaggatacgcatgtgatggttgagatcaaaaatacccgggtaattgcccggctgttggatggagaattcatcaaataccgtcagatcatgcccaccgatcatcacacgcgggtgcaggtggccgcgcgcgatctgtttgacagtatcgaccgggcctcgctgatggcgcgggaggggaaaaataacctggtgcgcttccagatcagtgaaaataagctgatcttaacctcaaactcggagatgggtgacgtatacgaggagatccccatcgccatggaggggcaggacttagagatcgcctttaacgcgcgttactttaccgacgtgctcaagatcatggatgacgagaccatcaacctggactttaccacgaacatcagcccttgtgtggtcaatccggtggaaggcgataaattctcctatctggtactgccggtgcgcatttattaaggatgaatgaaaagggcctttaggggcccttttttccgtatgaattttgggataaaggaggtgaggggcccatgagggtggaacggctggaactgcaggattttcgctcttatcaaaaggctgcacttgattttgaccgggaagtaacggtcttttcgggcgaaaatgccaaaggaaagaccaaccttttggaagcgatttttttgtgctgtacggcgcgcagccacaggacccctcgcgaccgggagctgatccactttggcagcgaaggcgcgcagatcgtaacatcgatcagccgcctgaacggaaaaagccagatcaagctccaattatccgaaaaggggcgcaaaaaggcctgggtaggaggcgctgagctgccgcatatcggcgaactgctgggggtactcaacggcgtcatgtttagccctgaggatctgcggttggtaaaggatggtccggatgtgagaaggcgttttttggatatcagcctttcccagatcagcccgctatactttaatgccttgtccaattaccaaagggcgctgcgccagcgcaatatactgctgcgacagttagttgaaaaaaagagcacaggtcagggggatttggatctttgggatctgcagttgagccggtatggcgcgcaggtggccttccgcagggcggagtgggtggggcggctttgtcaggctgcccagcggatctattatgatatttcaggcggccgggagcatctgacgctgctatatcaaacaaaattggacttaaatggcacggtagaggctttgcaggatgaattatatacccgcatccaaaaagctcgcagtgaggatttaagacgagctacgacgacggttgggcctcatcgggacgagttggaactgaagataggggaaacggctgtgcgcacctttggttcacaggggcagcagcgcaccagcgccctttctttaaagctggcggaactgcgtctgatggaagaggaaaccggagaagcgcctatcctgctcttggacgatgtgatgagcgaactagacgacgaacgccagcggctcttgctcaaacatacctcgggcgtgcagacgtttatcgcctgtacaaattaccggcaactccctcccatggaacagcgggaaatggcggtctttgaagtggggatgcacgaaggggtatccggctgtaccctgatctaagaacaaagagaataaaaactgcccaatgggcagtttttttatggcaccgcggcgcggttataagcgatgcagcccgttcattcaaaagcagaaaggggcgcgccaatttccttcaaaccccttctaattatcccgaaaatagggtataatagtaaaggatatattattaagtaaaaaccccctccaaaagcagggggttattgggattttacttagaatcctgtcaaagaagggatggcggcatgatcgttcatattggcggagataaaatgattccggataaggaaatcatgatgatcttagaaggcgaaggggcaggcgcctcggcacatacgcgcaggtttttagaggggctgcggcaaaagggatgtttggagcaggtgtccccggaggggatcaaaagttatgtgatcaccggcggcagcggcgggatgatggcctatgcttcgcctatctcctcgcagacgctgtataaaagggcgggtttttccgccattaacgataacggttagagaaaaagcaactgtatcatccaaaattaggaggattttatgtctgaagaagtcgtacaacccaaccatggcgagcatgtttatgatgaatcccagattcaggtattagaggggctggaggccgtgcgccgcaggcctggcatgtacatcggctccaccagcgcacgggggctgcaccatatggtgtatgagatcgtggataatgccatcgacgaggctctggcaggatattgtgataccatcgcggtgaccatccttaaagatggggggctttcggtacgggataatgggcgcgggatccctgtgggcatccatcccaagatggggcgcccggcggtagaggtgtgtttgaccattctgcacgccggcggaaaattcggcggggatggatataaggtatccggcggcctgcatggggtaggtatgtcagtggtcaacgcgctttccaccaagttggaggtggaggtgcgccaaggcggcaatatctatcaccagacctatacccgcggcgacccggatatcgaccttgagatcatcggcgaaacgcaggagacggggtctaccatcaccttctggccggatggcgagatctttgataccctggaattccaatatgatgtattaaaaacgcgcctgcgggagatggctttcctcaaccgcggggtacgcatcaccctgaccgatgagcgggatggacaggagcagtttaaagagttttattatgagggcggcatcgtatcgttcgtacagttcctcaataaaaataaggagcctttattcccggagccggtctatatcagcggcactaaggataccgccagttgcgagatcgcgttacagtataacgatacgtatgtagagaatatcttctcttttgctaacaatatcgagactacggagggtggaacccatctggtcggctttaaaaacgcgctgacccgtgtggtcaacgattatgcgcgcaaatataagctgctcaaggaaaatgagaataaccttcagggcgaggatatccgcgaggggatctgcgcgatcatctcggtcaaactgatagagccgcagtttgaggggcagaccaagactaaattgggaaacagcgaaatgcggggcttggtggagagtgtgatgaacgagcatctttccaccttcctggaggaaaacccgacagtggcccgggcgatcatcgacaagtgcatgacggcggcgcgcgcgcgtgaagctgccaagaaggcgagggagatgacccggcgtaaaaccgtgttggatagcgccaacgcgctgccgggcaagctggccgattgctctgagcgcgatgccagcaagtgcgagatctttatcgtagagggggattcggccggcggctctgcaaaacaggggcgtaaccgggagtttcaggccatcttaccgctgcgtggcaaaatcttgaacgtggaaaagactcggttggaccgcattttggccaataacgagatcaaggccatgataactgcgtttggcgcagggatcagcgaagattttaacgttgaaaagttgcggtatcacaagatcatctgcatgacggatgcggatgtagacggcagccatattcggattttgatgctgaccttcttctaccgctatatgcgtccgctgatcgaaaacggctttgtgtacatcgcccagccgccgctttataaagtgaccaagcaaaagaccgagcagtacctttattccgacgaggcgctggaagcatacctcaatgagatcgggcgggattcaaactactccatccagtgctataagggccttggagagatgaatccggaacagctttgggagaccactatggacccggataagcgtatattgttgcaggtatccttggaagacgccatttcggccgacgagatattcgacaccctgatgggtgagcgcgtcggcccgcggcgggaatttatcgaagagaatgcgaagttagtcgttaacttggacgtttaattgccagggggcaccacctgaaaaatttaagggggcggccgatatgaaaattggttttaaaacgtttggacgcacgggtcttgtagcgttattgtgtgcgggggtattgttgaccgcgggatgcagtgcgatcgcaccaatggatagcggactgcaggataatgccacgggatatacaagcgagagcgccgtctatgatggagaacagggcgcagattccgcggcagtcccctccacagctgcggtgggggcggcgcgcgagaatcaaaagatcatctataccggggatatcaccctggaggcgcaggatgtgcgccagctgcacgacgagatcgtagaatccttaaagggctatggcggttacgtttccagcagcgatgtgtatgagaacgccgatgggcagttgtacgccaacatcaccgtgcgggttccgaccgagcagatggatgcgttccgcgccgctttaagcgataaggccaaggtcacccaatccagccagaacgcgcaggaggtcaccgaggagtattacgatatcgaggccaggatcgagcacctacaaaagcaggaacaggaactgctgcggctgatggaaaaagcccagacggtagaagagatcatgaaggtgaacgacagcctctccggcgtacaggaggagctggaagtatatgagggaaaaaagcgctatttagacgacaggatcgacgattcgacgctggacattcatatccagccggtcagggagttggttaagaccagccaggagagtatccaggccatgacgggcgaggagctgggcaatgggatgctcaagggattggacaattcctggcggatcctggtcaatatcctgggctttattgtgatcggcatctgctatttgattttgccgctgggcgttgccggggggatcacgctgctggtgatctaccttgtgcgcaggcataagcggaaaaagacggccaaggcagaagccgccctgcaaaaagaggacgaaacaaaagaggaaacgcagcaatagctttttctcgaaatagatttggagcgtgaatgagcgtggaaaacgagaaccgaattaaaccgataggcatcgaatcggaaatgaaaaagtcgttcatcgcctatgcgatggcggttatcatcaaccgggcgctgccggatgtgcgagacgggctcaagcccgtacaccggcgtatcctttattccatgagcgagttgggcctgacgccggataagcccttccgtaaaagcgcccgtatcgtgggcgacgtgttgggtaaataccatccccatggagatacggcggtgtacgatgccatggtgcgcatggcgcaggatttttccatgcgctaccctatggtggaggggcacggcaacttcggctcggtagacggggacggtgcggccgccatgcgttataccgaggcgcggatgaacaagatcaccatggagatgatcgccgacatcgataaaaatacggtggattttgtgcccaacttcgatgagacgttgatgcagcccgccgtgatgccggcccggttccccagcctgttggtcaacggttcgggcggtattgccgtaggcatggccaccaatatcccgccgcacaacctgcgcgaggtggtggatggcgtcgtcgccatgatcgacaatccggatatctcggtagatgagctgatgcgctatatccccggcccggattttcccaccggcggcatcatcatgggcaccagcggcatccgcgaggcttaccgcaccggccgggggcgggtggtgacccgggctaaagcggagatcgaacagatgcacaacaaccgtaaccgcatcgtggtgacggagatcccttaccaggtgaataaggcacggttgatcgaaaagatcgcagagctggtgcacgaaaaacgggtggagggcatcagcgacctgcgagatgaatccgaccgcagcggtatgcgcatcgtcatcgagcttaaggccaatgcaaaccccaatgtggtgctcaatacgctttataagcacacccagatgcaggatacctttggcgtgatcatgctggccctggtggatgggcagcccaaggtactgaatttaaagacggtaatcggccactatatcgaccatcaaaaggacgtgatcacccgccggtgccagtatgacctggagcgggcgcaaaagcgcgcgcacattatcgagggtctgatcacggcgctggatcatatcgatgcggtgatccgcctgatccgcgccagcaagaccacacaggacgcacgcgcgggattgatggagaatttcggcctatccgaagcgcaggccgtggcgattctggaaatgcggctgcagcgtttgaccggtttggaacgggaccgcatcatggaggagtacgatgggctgcaaaagaccatcgcttaccttctggatgtattgggggatgaacgcaagattctgggcatcgttcgggaggagatcctggtggtgcgtgataaatatggggatgagcggcgtacggagatcacccagttggccgatgagatcgacctggaagacctcattgaggataaggacatggtcattaccctgacgcagctgggctacgtcaagcgcttggcgaccactacttaccgcagccagcggcgcggcggcaagggcattacggccctgcaaacccgcgatgaggacgtggtggatactgtatttaccgcctccacccatcaggagatcttattcttcaccacgcgcgggcgggtattcaagctcaaggcctatgagatcccggaggcggggcgcacggccaagggcactgcgatcgtcaatctgctgcaactggatggcgatgaaaaggtacgcgcagccctgcctgtgcccaaagaggaagaatttaaatatctggtgatggccactaagggcggcatgattaaaaagagtgaggtcgcagcctttaacaatatccgtaagacgggcctggctgccatcggcctgcgggagggagacgatctgatctcggtgcacctttccacaggcgaggatgagatcatcgtggcgacccggcaagggatgaccatccgctttagcgaaaaagacgtgcggcccatgggacgcaccgctgccggcgtgcatgccatcggcctgcggccaggggacgaggtgatcgatatggccattctcgacccggataaagaggtattggtgatctctgaaaagggctttggcaagcgtacgcctacagaggaatatcgcctgcaaagccgcggcggttacgggatacgcacactgctgattacggaaaagaccggtaacctgtcggcactgcggctggtggatcaagatcaagatattatgattataaccgcagaaggcatcgtgatccgtatggatgtggccaccatcaactcccagggccgttcgacgcagggcgtcacgctgatgcggctgggagaggatgaccgggtagtaagcgtagccattactgaaaaagaggatgaactggaggaagaagaggcggccgatgggttgacagaagatgcgcagcgcgaacagacggaagaattaggcgatgtgacttcggactctgggttggatcggttggtagagcgcgctatggaacaacaggagcaagaggatgccctggacgttcaagaggaagacccagaaatttagtataaattagccgtatgacgaaaacgcctggcattttgccaggcgttttataatatattattagattttaaatctttattacaaatattaacaacttattcataactttgcgatttgtcggtgcaaacttttggttagactgggctcacaaaccaatggaaagggcgggcggatcgttaaaatggagaagggtgcgacagtcaatatcaaggatatagagcggttcaagcggtttatccgcaggttcacggtcgtattgttaatggcgttactgtgttgtgcggtatttatgtggatgctctcttccctggcgggcggagaaaagcagccctccgcagcccagaatgatgtgcaacggtcaaacgatgttacttcgaagggcgcagacgccgcgaagagcagtggggagacggcgcagccagtgcagggcattagccccgatccgcaggcggcaacggcttattgcctgaccttggtcaatcgtacgtgcaagatggcccagaatggtgcgcaggatctggtcagtatccgcgagtatggaaacggctgctatgcgcttggctacagtaacctgcagggaaacagggaggcggtgctggccttaaacgagatgtttgctgcggcacaggaagcaggcttccatgatttcgtcgtacagagcgcctaccgcagctataaaaagcaggagacgctgtttaaagaagaaattaagaagtataccaatcagggctattccagagcgcaggcggaacagctggccaaccggacgctggcccggccgggagaaagcgagcatgagaccggattggcctttgacctgatgatctgcaataccaccagcttgtacgattttgaaggcacccaaaatgaaaaatggatcaagcagcattgcgctgaatatggatttatcattcgctttcccccggataaagaggaaatcaccggcattgcaagcgaaccctggcatatccgctatgtgggaaaggagcacgcgcggtgcatcacggaaaacaaactctgtctggaagaatatatcaaagcgctgaaagggtaaagcaaagggcggcaaaagccgcccttttttgtatttaaatttttttgatcacacattgaagcggaagaggaccacatccccctcctgcattacataatcgcggccctcgctgcggaccaggcccttttcgcgggcggcggtcatcgatccgcaggcgatcaggtcgtcataattgacgatctcggcgcggatatatcccttttcaaaatccgtatggatctttccggcagcctgcggcgctttggtccccttggtgatggtccaggcgcgcacctcttttttacccgcggtcaggtagctgatcagccccaaaagggcataacctgcagtaactagctgatccagccccgattctttcagccccagttcctctaagaacagctgcttttcatcgtcctccatctgggagatctcgctttcgatctgggcggagatcgtaatcagcccgctatgctcctgctgggcataatcgtttagcgccttgacggggggcaactcatcgatcgccttgcccacatcgccttcggcaatattggccgcatagattacgggtttggaggagagcaggaatagctcgtccatcatctcgcgctcttcatctgaaagctccgcgacccgggcggattttccctcctccagcacctttttcagcttttccagcaaatcgatcaggccctgttgggatttatcgcccttaagggccttgcgcgcgcgatccatgcgtttttcaacggcctcgaggtccgaaaggatgagctccagctggatggtttccacatcccgcagcggatcgacactgccatccacatggacgacattggggtcctcaaagcagcgcacgacgtgcacgatggcgtccacctcgcggatatggcttaagaatttgttgcccagcccctcgccccggctggcgccccgcaccaggcctgcgatatccacaaactcgatcaccgcgggggtgattttctctgtatcatacagatcgcccaatacctttaacctgggatcgggcacggcgaccacgcccacgttgggatcgatcgtacaaaaaggatagttggcggcctctgcaccggcgcgggtaatggcgttaaatagcgtgctcttgcccacattgggcaggcccacgataccaagtttcatggtttaaaactcctttattgcgttctatacaaaaatggagtgccctagcggtaaggcactccatttattataagctttaatcccgggtttggcaatgcaatcaatttacaccgtcggtagcgagcgccgcgatggcgtgcgcatagacccgggcgcccagaagcaggctgtcgatctccacatattcgtccttctggtgcgctacaccctctttaccgggcaggctgaacccaaaggcgaccgcgtttttcagcgcacgggcataggtgcccccgccgatggtcacggtatacccttcaagaccggtctgctcctcataaactttgagcagcgtttggatcaggggatgatccttgggcatatgcaagggggcgtgtccatggagtttagttacctcaaagccgcaggcggaaagcgcggagaggatattctgccggatgtccttttcctcatcaaaggtgatggggaagcggatatccacaatggcctccagcacgccgctctcatagcgcagaacgcccaggttgcaggtaagatcgcccgaaacatcgtcatgcagcttgatctgcaagccagcgccgtccgtatcgatggcctgggcagagagcaggcggatcgccgaggcgacgctatcccgtcccagcactttctccaagcacaaaagcaggccggctgcggcgttattgccctcatccggagaggcgccgtgggcgcttttgccctcaaagagcagatgcagcaccccatcttcctttttcatcgtggcgatcaacttgcgatcctgcgccacggctttagcggcggcgcgtaacaggtcttgatcgatcctatccaggcgcagggtagcgctggccttttccggcacgacattggctacagtacccgcgctgatggagatcaccgggcaggcgcgcacatcatcttcatcaaaagcctttttgatgctgaaatggaccacgcccttttccgtattgatcagggggaataccccgtccggcacgatgcccaagtccggcatgggcaatttctgggcgtagtaagccatatccttccaaccggtttcctcgttgatgccgaagataaagcgcaccttgcgggtaaagcgcgcgccgctctccattacggccttcatggcgtaaagcgatgcgatggtgggtcccttattatcatccgcgccgcgggcatagacgcgcccatcctttaccacggcctcataggggtgcacgctccagccctcgccctccggcactacatccaaatgacagaggatacccaacgtttcctccccttcgccatactcggcccaaccggcatagccatccacgttgccggttttaaagcccaggctggaggaaaggttcaacatgtaattcagcgcatcgtcgcaggcctgcccaaagggcttgccgggcagcggctggccctccaccgaggggatgcggcacaacccctgcaactgggtgacgatctggtcgcggtgctgctcaaggtattgatttaagcgatccataggcgcctcctaaaaggttatttttctgttgatttcagtatagactccccggcgtgcgcctgtcaatgaaccggcccttatgaaaacggacagcttgtatcgaaatttggttgatgttagaataatacaaaagaatatacagatatacgccgcagaccggggcagacatataccgcaatgcaggcgttaaaattgggaagcgatacgaaagaggggtgggccacgtgcacgaagggcaccggaaccgcatgcgggataaactgctttcgggcggaatagaaaattttgaagaacatgagatcatcgaggttttgttatactattgtatccccaggcagaataccaatgaaatagcccatgcgctgttggagcaattcggttctttgcggggcgtgctggatgccaacgcagatgagttgcaaaaggtgccgggtatcggcccgaatgcggcggtgtttttaacgatgctgccgcaggtattacggcgctatgaactggagcggtttgaaaagcgccccctgttgggggattcgacttcgtccagcctgtttgtatatgaattgcttaaaggcctgccagaggaacggtgtgttagcctgtatctggatacccgcagccgtttgatccactatgaaatattgggcagcggtattgccaatcaggtcggtatccaatcccgcaaagtgttggaaggcgccatgcgccaccgggcagtatcagtcattatcgcccacaatcacccgggtgggagcagaaccccctccagcggcgatcttgccgtaacctacgatgtgatgaataccctttctgcaggcggggtacggctattggatcacctgatcgtgaccaacgaaggggtcacttcgcttgaaaacctggggcttttaaaagagaaggatccgcaaaagacaaaggagatcgctgaagcttacgagatccttagcaaaagggcttttgacaagaataagggaaaagatgataaagaggccgcaaaactgaaggacttgttacaggacaaacagcggatcctgcgcaagatcaatggcgaagaatagatagaaatttgttttatattgaagaaaatgatgatccctaggaggcggctggatcatagaatacccctggagaggatcgcgcctgatggcgcaagcagttaaggagggaaactatgcggcctttgatcggcatcaccaccagcgattcggacaatggcacccatattcagctgcggatggattaccatcaatccgtagaggatgctggggcgcagcccgtattattatggcgctgcggcgaggcggcggcagaggagctcgcgcagcggctggatgggctgatcttggccggcggcggggatatggacccggcgcgctatggccaaacgcgccatgagaagacagagctggtgtcttccggaagggatgataccgaactctggttgacccgggcttttttggaggcatgcaagccggttttgggcatctgccgcgggatacagacgctgaatgtggcgttggggggagatttgatacaagatctgccccaaatgcggggggttaagcacgccaacgtacgccatgagatcacctggcctgaggaaagttttttaagcgcgatctttccctatggaaagattgaggtaaacagctttcaccaccaagcgatagggcggctgggcgcaggcctgcaatgcgccgcgcgtgctgcagacgggacgatcgaggcggtaagcgacggggggcgtaacctatatggggtacagtggcacccggaaaaggaaggcggcgcgggccagcctatggcgccgctgttccgctactttgttgcgcagtgcataaggtaacatcaaaatattttagggccggcggaaagccggcctttttttatagccgataattgtatcgattgcgggtaccctaagagcggatgaaaaaatctatctcttgtgaaaacaaaggggtttttgtataatgaataaactgtcccacttcatctgcacacctttacggagaaatatacattttttgtaaaggatggtataatgaggggcgaaaagcgtaaacggccactattaggaggttttaaacttgaaacagtctttagcgatgtttgtaaaatacaggcatttgctatttaatctgatcgggcgggacttaaaggtgaaataccgccgttcggtgttgggcatcctgtggagcgtgctcaatccgcttttgatgatgctggtcatcaccgccgtcttctccaatatttttaagtttaatattgagcatttcccaatctattatttaacgggttatacgctgttcaacttcttttccgaagcgacgaacatgtgtaattcctcaatactagaggccagtgccctgattaaaaaagtgtatattccaaagtatatttttcccctggaaaaggtgacctttgccctggtaaacatgctattttctctcatcgccatggccctgatctatgtggtgacccaaacgcctatccattggacggcgttactgtttccgatacccattatctatacattctgttttgcgctggggatggggttgctgctatcggcgcttaccgtatatttccgcgatatcctgcacctgtacggcgtggtgctgacggcctggatgtatctgacgccgattttttaccctgtcgatccgcaggctatccccgcatttatgctgacggttttcaaattcaacccgctctatcattttgtgacctataaccgcaatattatgatgaacggtgtcattcccgggctggctgataacctgatctgtatgctgtttgcaggtggggcgctgattgtagggttattggtattccgtaagttgcagcgcaacttcatccttcatatttagggagaatgagttaagatgaacgtggtagaagtaaaaaacgtaaccatgaactttaaccttcctaaagagaaggtggacagccttaaggagtattttattaagctcgttaaacaccaactgatgtttgagaagtttgttgcgctggataacgtgtcctttgagattgccaggggggatgttttcggcatcgtaggctttaacggcgcgggaaagagcaccatcctcaagatcatctccggtattatcgctccctccgagggcagcgtggtggtggatggcaccattgccccgctgatcgaactgggcgcgggctttgatatggagttgactgcccgggaaaacgtgttcttaaacgcaacggtactgggctattctccggattttattaagagcaagtatgatgagatcatcgattttgccgaactgcgggaatttcaggatgtagccgtcaaaaacttttcctcgggtatggtggcccggctggggttcgccatcgccacggtggtgacgccggatattttgatcgtggacgagatcctttcggtgggcgattacctgtttcaggagaagtgcgagcggcgaatcgacgaaatgatgcggggtgggaccacggttattctggtgtctcatgcgatcacgcagatcgaaaagctgtgcaaccgggtcttgtggctggatcacggcaaggtcaagatgtgcgggccgatggcagaggtcactgagcaatataagcattatcataaataatggataaatgaataaggcagcgcggcggagaaatccgccgcgcttttttatggattgaaatccgcgataaccgttaaaagggcgtttaacttttcgatgttttgcagggtgtcgcgggtgatatagtgctcgatctgctcggtcagctccagctcgccttgagaatgattgagcaggcagaaaaagcggttgagcgtttcgtgccggtagagcaggtattcccccagctttgttccctcctgggtcagtttgatgatgccgtacttttcgtaatctaccaggccgcaatctttgaggttttgcaccattttggaggaggaagagggcttgacgtgcagcgtttgggatagagtgctgatacgggcgtacccatcctcccgggtatagcggtagatcatctccagataatcttccatggcgtaggtgactttatgggggctattgagatcatagcccttgagcgttctgaaatcctcattttcggcatgcgccatggttccacttctccattcgtccgtaacacctggggctggctggacatatgttagtagcgggaaacaaatttccttcacactaatttatgataaggagcccttttttatgatagcaagtatgaagcgtacccttaacaccgtagagatcggcaatatcgtacaggtagaagaactgacgctgagcggcagcatgcgccggcggctccaggatatcggtattatccagggcacgcgggtggagtgcctgcagaaaagcccttctggggacccgacggcttatctggtgcgtggcacggtcatcgccctgcgcgcagaggatgccgccggcatcgccgtgcgcgccgtttcctgacaaggcgcaagaggaggtgagggcagatgggtttaacggcaggctcaacgggcgcgggggctgtggataaaggccttacgatcataaaacaaaaacccgaggatagggtcatcgccctggcaggcaaccccaacgtggggaagagtacggtctttaacgagctgacggggttgaatcagcataccggcaactggcccggaaagaccgtgaccaatgcccagggccactatgcctataaagggacggattatatcctggtggatataccggggacttattcgctgatggcgcactcggcagaggaggaggtggcgcgggattttatctgctttggcgatgcggatgcagtagtggtggtgtgtgacgccacctgccttgagcggaacctgaacctggtgctgcagaccctggagattaccgaccgggtggtggtatgcgtcaacctgatggatgaggctaaacgcaaagggatcgcgatcgactttgaaaggctggaaaagcggctgggcgtaccggtagtcccggccagcgcccgcgcgggcaagggattagacacgctgatggaccgggtgaacgaggtctcggcccggacggggcgaaaacgggcgctagacgtacattataaaccgcctatcgaacatgcgctgatctcgcttgagcccctgctggccggcatcgtgggggaccggcttaacccccgctggctggcgcttaaactcatggggggagaccctacgctgctgacggcgttaaaagagtacctagaactggacctgatggaggataaacgggtgcgcgcggcgctggaggaggcgtggcgctggctggcggataggggcgtctcccaagagcaatttggggatcaggtggtctccagcctggtgttaatggcggaaaacacctgcaagggactaatcacctatcaaaagagcaactataacgcgaccgacagaaagatcgattattacctgaccaacaagtggaccgggatccccattatgctgctcttgctgcttttggtattctggctgaccattacgggggccaactatccttctcaattattaagcgatgggctcttttgggtacaggaccgcctcagcgaattttttgtgtggatgggcgcacccacctggctgcacgatatgctggtgctgggggtataccgggtattggcctgggtcgtatcagtgatgctgccgcctatggcgatctttttcccgctgtttacgctgctggaggacctgggatacctgccgcgggtagcctttaacctggataaacagttaaaaaagtgcagcgcctgcggcaagcaggccctaaccatggcgatgggatttggctgcaatgcggcgggcgtagtagggtgccggatcatcgattcgccccgggagcggctgatcgctaccctgaccaataactttgtaccttgcaacggccggctgccgatgatgatctcgctgatcagcatgttctttatcggcacggcgatgggctttggccaatccctgctttcggcactcctgcttactggggtgattttgctggggatattgatgaccttttttgcctcccgtctgctttccaaaaccgtgctcaagggggtcccctcctcctttacgctggaactgccgcctttccggcgcccacagatcgggaaggtgatcgtccgctcgatctttgatagaacgctattcgtgctggggcgcgcggccgcagttgccgcgccggcggggctgatcatctggctgatggcgaacatcaccgtaggcgataccagcatcctgctgcactgtgcgcagttcctagatccttttgcacgggctattggattggatggggtgatcctgatggcctttgtacttggctttcccgccaatgagatcgtcattccactggtaattatggcgtatatggctactggaaatatgatcgagatggataacttgacggcgcttaagactttattgatcgataatggttggacgtggctgaccgcagcgtgtaccatgcttttctctttgctgcactggccctgctctacgacgctgctcaccatccataaagaaacgcgcagcctgaaatggaccgcgctctcgtttttaatgccaacggcgataggcatcgcggtgtgctttatcattaccacgctggccagggcattcgggctggcctaaataaaggcggctaacggatcgggcggggagtttccccgcccgatatttttaaaaagtcacacttataatatggataatgacatattgcataaaaatacgactatagactgtgaacacacccgatgtaccggacaaattgcgacatatttattgcttttataggggaaagccggtataaatatagatgtacccatagcgtttcgggtacgtttgtacgcaatcgataaatgatattagatataaggatggtagaggtcttgccggagttcaggagtgaaaaaagatttgcgctttcgttaagccagcggaacatatgggatcaggagcgtgcgctgccgggaacgtcggtcaataacattagtacgaccatccgcatcaatgggcgggtggatttcggactgctgcaacgggcgctggaccgggtcttggaggcggatgcgtcgttacgcacccgtattacgctgcaagagggcgagccgttgcaatatcaggcaccgtatagcagagagctgtttccgatatatgatttttctcacacctcttgcgaggggatcgagagctgggaaaaagcgatgacgcgggagctgatcccactgctggacgcgccgctgtaccggtttatctttttccgcgcgggggaaaatgccggcggcgtactgatcaagatccatcacatcatctcggacggctggtcgcaggtgatgatctgcaaccgcatatccaagacttatctggcgctgcttgcggggcaggatgtggcgcttgaagcagcacccagctatgaactgcatgttcgggaagaacaggagtatctgtgctctaaagcctacgggcgggatgaagcctattggcgggagactttagccaaggcgggcgaaccctcggtaattaaatccgtcaagagcgcggccgtaagcccggtgggccggcgggtgagtttcgcgctgccgcaggtgcttaaccacgccatctactccttttgtgtggagcatcgcgtggcgccctttgccgtattttatatggcgctggccatctactttaagcgcaatggcggcgccaggcgctttaccatcggcgtgccgatttttaaccggaccaattttacctttaaaaagagcacgggcatgtttgtcagcaccctgcccttttttaacgagctctgcgataaatggagcctgaccgagttcaacgaacatttggccgaggcctggtatgagctgttgcgccaccagcgctttccgttttcgcatatcgcggcgctggccggcggggataatgaggggcggctgttcaacatcgcgctttcctatcaggacagtaagatctacgagagcgaggatgcgcgggtggtcttttccggccgctggcactacagcggctaccaggcggagcagctttgcatccatctgagcaatatggaaaaccaccggcgctatgcggtggattacgattacctgacccagtttttttctgaacaggagattcgcgcgctgcacgatagcctggtcaccatcctgcttgaggcgttggggcagccggatctgcctatctacaagctctcggttctgcgcccggaggagcgggaacgggtggtatatacctttaaccgcacggcaaagcccctgccggattgcagtttatatgaggtgtttgctcgcgtcgtccaggagtatccccagcgggcggcggtgatacgccaaggacggcgcaccacctatcaggcgttggatgaacgggcacgggccatcggcagcgcgctgcggagcgtgatgggggaaaggaaagggcttatcgccctcttgctgccccgggaggaggacttgctggcggctatggtgggcgtactgtccgccgggcaggcgtacctggtgctttcgggcgagttgccggccaagcgtttagagggcattctggcgcaaagcggcgcggccgcactgataaccagagggcagatgctgagcgggcgccagctgcccgaagggctgaccgtgctgaacttggacgagccgctggcggcaccggcatctcctccgctgcaggcggcgcttgatgagctggcctatgtggtatatacctcgggcagcacggggaccccgaagggtgtggagatcaccgggcgcaatctgctcaactttgtacgggccatggggccggtctatgccaagggcgccgtactatcggtatgtaatgtgggctttgacgcctttatgatcgagagcatcgtagcgctgctcaacgggcgcacggtcgtactgcctgaggatgcgcagcaggaatccccccgaaggctggctgagctgatccgcgggtacgcggtgggctttttgtccatcaccccttccaggctctcggcttttctaaaagagcccgcgtttgcccaggcgatgcgggggatcgagcgcatcgtctgcgggggcgaggctttttcgggcgagctgatgcgcaggcttgaggattgcaccgccgcgcgggtctacaaccagtatggcccatcggagaccacgataggcgtaagcttaaagcagatgaacggcgccggcgccattacggcgggcgcgccgatggataattgcaaactgtatgtactggatgagtggcgcaatcccctgccggtaggcgtgtatggcgagctttatatcggcggcgcctgcgtagggcgcgggtaccgcaacgcgccggagttgacggcggccagctttatccccagcccctttgaacagggcgagcggctgtataaaaccggggatatggcctgctggacgtcggagggcgagattttgctggctggccggctagatcggcaggtaaagctgcggggtctgcggatcgagccacaggaggtatccgcttgtctggagcggcaccccgcggttaaacaggctgcggccagggtgtttatacagcaagggcacccgatgctggtggcctattacgtggcacagggcgcgacgacggagctggagctgatgacctttgcggcggattacctgccgcggtatatgctgccggccagcatcgtcaaacttgaagccttgccgctgacagccagcggcaaggtagacgaggctaatttgcctgtgccccagcaaacagacggcgaagatgacctgcctgtcgggcgggaggaaagtgaaatattggcgatcttccgcgaggcgctggaaaagccggagctgggcgtggacagcgattattttctctcgggcggggactctctgggggccatggccgtgctggccaagatcgaggagcggctggggcaggcgctgcggatctcccagctgtatgcggcgcgcacccctcggaagctggggtgcctgctgcgcggcgaggatgcgcccaaccttacaccgcgccaggccgtgctgcagagcgcgccgcatcaggcattttatccgcttacgcccattcaacagggtatttacgtgcaaagccagatggaccctaccggctttgcctatcatatggcgggcgccttccgcctgccggctgaaccggatgcgggaaggctgcaggccgctttccgcgcgctgatcttgggggataagattttccgtaccggctatgaggtgcgggggggacaggtcgtcgccaccgttgccgactcggtagaatttacattgcccgttttgcaggaggcggatttcaaggccgtctgcaaggcctttttgcagccctttgacctggcgcgtccgccgttgttgcgcgcggcgctttggcaggaggggctggactggtatctgctgatcgatagccatcacctgatcggagatgggatgagcacgcccatcttgctggaacgtttagagggttaccttgcgcaaacgcaggaagatgtcccgctgggttatcaggattatgcctatgccctccaaaagggcgtgctgcgacccgggcaggcgcagcacctggcctattggcgagaaaagctgaaccccatgccggagaagctggaactgcccacggacgcggcccggccccggtctttcgactttagaggtgggcagcaaaagttgaaactggacgcgaggttctcaaaagctgtggatgaattctgcgagcgggagggcataacgccctttgccctgatgctcgccgcctatggattactgctgcgggcggtatccggccgggaggactttaccgtgggcacgcctgtttccgggcggttgcggcccgagctgcaggggatctgcggcccgtttatcaacaccctgccgctgcggctgatgccgggtggggagctgagcgggaaagcatatctgcaagcggtaaaggatacggtgacggagttgctggaacaccaggactgcgcgccggagcagatcatttccgcgcttaatctgcccagaagcgtagggcaaaatccactgtatcaggtggcgttttccatgcgtccctttgaagttagcgcgctaaagctgatgggacaggcggttaaataccgcgctatccccaatgccacggctaagggggagctaaatatagaggtcgcccgggaatcgggctgctatgaattgacggtggagtatgcctccagctattttgcacccgaaacggcggcgttttatgcccggtgcatgcgccagggcgtgcgtgcgctgatggaaggcgccgaaagctgcctaaaggcgctggatatcctgccgccggaagatcggatccgcctgatcgagcggcccaaccatacctttaccccctttgtggacatgcccatcgcccagctgatcgcccagcaggtacttttggacccggagggcgttgccgtttatttccacggggaggcgactacctatgcgcaactggatgcacaggcctgccgtatcgccaacctgctgacccgggctggggtaaacaagggagaacgggtgggcttggctacccggcgcaggccgcatctatacgctgcgatgctggctatcctgaaagcaggctgcgcctatgtgccgtttttatccagctttccggaggcgcgcatcgcctatatgctggataccgccggggccaaccatattctgtgcgatggagaaacggctgccgcgctgcccgccgggctgcgccagcgggcgatcctattggagggcgaggcgccggatagctttgaggacgccgtggtaggccgggatgaactgatacacgtgctgttcacctcgggctctacgggcaagcccaagggcgtcatgatcccccagcgggcgatcaccaacctgtatggcggggtcagcgcgctgtttagcggctcgcccgggccgattttatgcaccacgcagttgatcttcgatattttcgcctcggagagcctgatcccgctggcgatgggcaagcccatcgtgctggcggatgagcaggagatgatgctgccctggaagatggcggagctgatggagcgccatggggtaaaatacatgcaatttaccgcctcccggctgcaaatgtgcctgggtaatgaggctttttgcagggccgcggcgggcctggagctgatgatcgtgggcggggagccggtatcggcccagctggtggagcggttcaaagcagcttcgccagcgcacctgatcaatatgtatggccccacggaggataccgtctatgcgacgctgacagaggtagaacccggccggccggtgaccatcggccaccccatgcccaacacccgcgtatacgtatgcgatgaggcgggccgccctgttttgcccacggcctgcggggagctttgcctggccggggcaggcgttgccgacgggtatatcggccggccggacctgaccgaacagctgtttgtggaggacccctacttccccggggaaaaaatgtaccgcagcggggatcttgggcggctgcggctggacggcacgtttgactgcctggggcgcagggatgcgcaggtcaagatcaacggacagcgggtggagctggaggagatcgccgccgtattgttggagggcgatctggccagggaggccgcggctatcgtactggaaaagccggatggttccagcgagatcggcctgtttttcgtcccaaaaggggaggttggccgggcacaggcagaggcgttgctgcaaaaggcgcttccgggctatatgctgccctctcaatactatgtgatcgcgcagatgccctacaccgccaccggcaagaccgatcggcgggctttaaaggcgatggcctgtgggacaatgccaatgcaggaggtttttgcgcctaaagcgtcggctacagcacagggtgcggagcaaatcgcagaaaacgaaagcatgcagctcttgcaaccggcccccgaacccggggagagggcggctgatggggcggttggacaggcggaaaaggccataaaagcgcagcgtgaagaagagccggaaagagctaaagacgccagtgtggatgaaattttaacgatttggcaggaagcgctgggcggagaggagctgcgagccgacgttccattttttgaacagggtggaacctcgttggcggccctgggcgtgctcagccaatactataaccgccattgggagatgacgctggaacagttctacgcgcagcccacggcggccgcacaggcggcgctgctgacgggcggcgaatcggaacaggcgtatgagcagcatataccggaacccagggcgaaacggtacccccgcaacgtgcccttgcctacccccatgcaaacgcagcctccgcgcagcgtattgctgacgggcgccaccggctttttcggggcgcatctgctgcgcgcgttgctggacgccggtacgcaaagggtatattgccttgtgcgcggcggggatgatggccggctgcaaaagacgctggcctggtatttcggccaaggttgggtgcgtacgcatcaaacatttataaaggtattgcccggcgatgtcgggcagcatcagctggggctgagcgcggcggactatgcactgctggcaggccggatagaggctgtttaccatgctgcggcggatgtgcgccattacgtggcgcaggatgatcagatcaacctgcagggcgtgcaagcgacgatagcccttgcgcagacggcgaaagtgccgctgatgcacatatccaccgccagcgtcgccggggaatatttgctagacgaaccggaccggtgcctggaattttgtgaagaggattttgatatcggccagaactggcaggacaatgcctacgttcgcagtaaattcttagcggaggcggcggtctatgaggcgatggaccggggattgcgcgcacaggtctatcgcctgggccggctggttgggcgggctacggatggcgtattccagcgcaaccctgaaaataacgccttttacatgctgttgcgcgcggtgcaggcgctgggggccatgcctagcgccatggccggtatcccgatggacattacgcctgtggaccgggcggccgaggcagcagtggccctgcgcgatgcgcctatgacggcgctgcacatcctttcgcctcatccgcctacgatgggcgaggtcgtcagagcagtgctgccgcaggtacagttggtggatgaacaggcgtttgaggcgatgctagaaaaaggggcgcagggcgcacaggccaaggtgctatcgccgctgattgaaacctggacgcatgccaagatgcgcccggcgcggatcgcgccggtatgcgtcaagacggcgcgctggctggcgcggctgggcgcgccgctgccggaaggacgggcagggacgctgctagccgaatttagggatgggggtgaagggcgtgatctctgatgcggccaccgcgatctttaccgctgcgctgggcgcgatattgctgtttgtgatctggagcctgcgcaaccagaaaatggggctgatccataagctctacctggccatggcgatctcctatggattttgggccggcgcgctgatctgcctgcggttcaccccgcccgacaatgctacctggcagtttatctgggatgcctgcaccaacattggcgggccgtttacgccggtgctttgcctgtgtattgccctgacctttgtaaaaggctgggaaaaactgccgcgcaaggcgtatttgctgtttgtcataccggtactgaccaatatcgtggtgtggaccaacccgtggcaccacttgcaatacgaggtcttttccacggtgcgcagcgagatcatctttggcccgtattcggtggtatcgggggtttactgctatttttgcctgatcagcagtatcgtgctgctgatcaattttgcccgcaagaatcccagccggctgtataaattgcaatgcctgctggtctgcctgggcgagttttgccctctggtggtcagcctgatcgccacactgggcacacagatgcccatctcggcgacgccgctgagtttcgtcgttacgatcgtgctgcacggcatcgccatctaccagctgcattttttagatatcaagccgctggcgacccagcaggtgctggactggatctcggattgttatctgatcctcagcgatcagggactggtgctggattttaaccagccctttgccgaggtgtttgcctcccgctatggcattgcggagaatcgctatctgaaagactgtgtgaaggaagaggatatttctaacaaaacggccctttataacctgatgacggccatcaaatcctgccgggagagcctgtcgatgatctcttacgaacaggcggtgactttgccccgggaggatggcgtgcaaaagaactattatattaccgatgtaacatcgctggtggtcaagggcgagatacagggctttgtggtgatcttcaaggatatcacccagctgaaaaggagcatgcagcagctccaggatagccagacccgcatgatggagcaggaacgtctggcctttctggggcagatgatgggtggcctggcccacaacctaaagacgccgatcatgagcatatccggctgcatttccgcggcggaggcgttggtggaggagtgcgaggagagcctggatgacccggaggtagtagcggaggattaccgggagatctatgctgagatacgggactggttccagaaagtgcgcgagtcctccgcctatatgtcagatatcattacagccataaaagggcaggcggccagcgtatcggcggatcaggaatcctcctttacggtggatgagctgatcaagcgcaccacattgctgatgcgccatgaacttttcagcggcgggtgcaaactggtatcccagtacgatccgcgccaggagatcacgctgcatggggacatcaataacctgatccaggtgctcaataacctgatctccaacgctgtgtacgcccaaaagcagacgggcggcggggatattgtgctgggcgtttcctgggatgaggaggcgctgcgcatctttgttaaagaccgggggccggggatatctcccaacgtgcgcaagcggctttttaaagagatggtgaccagcaagggcacgatgggtaccggccttgggctatatatttcaaacgctgtggtgcgcggcaaatttggcggcaccatgtggcaagaggacaatcccgacgggggctctatttttgggatgtcgatccctagggaacggataacgattggaaccatgcaaccaagagaggaggttttaggatgagaaagagcaaggcatctgccagcgctaaaaacagtttttccatcctgaccttggatgacgacgcgatcatgacttctacgctgcaggcgtactttcagcgctccggataccgcgtggatacggagaacgacccctaccaggccatcgagcgggtgcgggaggggaaatacgatatcctgctgctggactttttgatgaccccgatctacggcgaccaggtggtggaggagatccgcaagttcaacaaggagttgttcatcatcctgctgacggggcataagtccatggcgccgcccatcaagaccatccgagagctggatattcaaggttactatgaaaagagcgagcggttcgaccagctggaactgctggtcgagtcctgctgcaagtccattttgcagatgcgcaccattaaaagctatcaaaacggcctggctgcgattatggattcgctaccgcagatttatcaccttcagtccctggagcagatcgccgacagcattctgcaggcggccacgggcttgatgggcacggtcagcggatttctggcgctggacccggcgtattaccagcaggagcatgcgcgtggcgggcaaaactttatcacccgcacccgagggcagcacgcttggccggatgtggagagcttgctatctgaggaagcccttagcgacgggcacgcgttggtggaagagggcgggagtctgatcgtccccattttggatgagcggcgcagacctatcgggcttgtgggggtggcgctgccggccccgcccaaagcggatcaggtccagcttttgcaggtgttcgccaagcaggcctccgcggcgatccgcaatatcctgttgcacagcctggtcaacgcaaaaaatgaggagctgaccggggcttaccgcacgctgcgggacagctatatggagatcgtcagcgcgatgcgactattggtggatgcgcgcaatatttacacccgcggccattcggatcgggtatccgactgggcggagaagatcgcccgggccatcggcatggacgaggcgcagtgcgagcgcgtacgggtggcgggcctattccacgatattggcaagatcggcgtgcccgatggcatattgctcaaacccgggcggctgaccgaagatgaatacgccgtgatgaagggacactcggccgaaggagccaaggtgttagaggcgatcagcctgtttcacgatatcgtccccatcgtacgggctcatcatgagcgtatggacggacagggctatcccgacgggttgcgtggggagcagatacccatcgaggcgcgcatcatcaccgtggcggattcatacgatgctatgaccagcgaccggcagtaccgcgagaacctgggatacgaagctgcggtgcaggagctgatccgcggcaaaggaagccagtttgatgcgcagctggtggatgcctttatcaggatactggaacaggaacgagaacgcgtgtcctaaacgaaagaggaagataccaataaataaggggaagaaaggcagggggcaaatgaaaaattatccgctgtatccggcaaaatattatgatacctttccggaatttattgatggcttggaacgggaatatgccgatagacccgcgatttcatactttaaccggcgcaaagaggaaacctgttttacctttggcgaattcgtaaagcatgtgcgcggactgcaggagatgctggcggaactgggcctggcgggcaggcatattgccatcgcgggggagaacagttatgattggctggtagcctttgtggcgatcgccggctgcgggggcgtggctgtgtgtatcgatgcggagcaatcggacgagaccatccaccaaatggcgaaaatggcggatgtggaggcgatattcgtttctaacacttacatagacatctgcaagccgctgctgggaaaggatggcccggtaaagcagatgttcgtcttaaacgccaaagaggccggcagccatcagagtctgcaggccctggcgcgggaaggcgctgcaaagctggacaatgggccggggcgggcgtttaaagtggacccggaccagggcgcggagatcgccttcacatccggtaccaccagcctttcaaagcctgtcatgctcagccaccgcaacattttgcacaacattgccgactctatcgcctatgtggatctggggcgtaaaatttttaccgccctgcccttttaccatacctatgggctgacctgtacggcgctgggcgcgctggcgcggggggcgcacctgtatatcaacggcgatctcaaaaccgccatgcgagatctgcaactggcccagccggattccatgctgaccgtgccgctgatgctggaggcgatccataatcagatatggctgagcgcggaaaaggccggtaaggcggaaggactgcgcaagctgatgtcggtcagccgcgtttgccgtaagatgggactgccctggcgcagcagcaagctggacgagatacgggaaaaggccgtgggacggctgaagatcgtagtctcgggcggcgcgcacctggatagcgagattgccgatgagtttgccttgctggggctgaccatgctccagggttatggtattacggagtgctctccgcttatcgccgtcaaccgcaacaaagcgtttaacaccgggtcggtagggtacgtcatgccgggctgcgaggtcaagatcgagcaggaggagatctgggtgcggggcgtgaacgtgatgaagggctactataataacccccagcaaacggccgaagtcatggaaggcgaatggtttaaaaccggagatataggctatttggataaggacggacatcttttcatcacagggcgcaaaaagaatctggtggtctttaaaaacggcaacaaagtttcgccggaaaagatcgaggagatgatccacaagattccgctggtcaaagatgtgctggtctacggcgcggccagcggcgcatccgcagacgatgtgaaactggcggccagtatctatccggacccggagcgcgcgcagggcctttcctcctacgagattctggagcagctgcaaagccggatcgaccagatcaacgccatgctgccgctgtatcagcaggtccaaatggtcaatattcgagagcagccctttgcaaagaccggcacgcagaagatcaaacgctaataattctggaaaaaaggaagaggaaaatgctggaattcatacaaaacattatctaccaggtcaccggtaagggcgacgttacctacgatacggactttattcaggatctggagctgaattcgttcgatattatgaatatcatctccgcttttgaggatcactttgatacgacgattcctacgcgggaggtttggcacctgcgtcaggtcaaggacgtgatcgaatatatgcggcaaaaagggatcacgcagccgtgaaagaagattttaacatctatatctatccatccgatagcgatgtgccggcgccacagcgcgtggtgctctgcgcggatgactatacgcagggcctgtgccatagccggccttggcgcattgccagaagccccatggggaagccctatttccccgatgtgccgcaggtgcatttctccatcagccacagcggggcttattggctgtgcgcatttggcgcgcaacctgtggggatagatctgcagatccatcaggcgggcaggctggcgcaaatcgcccggcgcttcttcaatgaggaggaggaccggtatctggcaaagggggattaccgcgacttctttgccgtttggacggctaaggagagctatgttaaattcaccggcaaggggattggcgatggatttggcgatttcagggtggcggacgccgcgggccttaaaacacagctggacgatgcgcgcctttgccgcctgccgtttttaagggactacagcctttgcctgtgcgcggcgcaggtcggtgtggtgcgcatggtttatcaagaatagcaatagaatagataaaatgaaaagccggcggttatccgccggcttttgccgtagggttatagatttatagctcggagctgaagacgtccccgtgctcagccttggctttggcgataaaatcgctgacggccgcggcattgggcatatcggcagagcagccgtggctggctaccagcatggaggccgatgcgctgccaaactccaggcagctgcggatatcccagccctcgaagatgccatacaggaaggcggaggcatacccatctccgccgccgaaggattttagcgcttccaccgggaagggcttgacctgatactgccggccatcatcggtataggcggtggagccggatttgccgtgcttgatgatcacgatcttggcgcccaggttctgccagtattgggcggtctgcttatcgtccgcgccgggctggatcaaggcctcggtcaggtcaaattcctcgcgggagcccaagatgatgtcgctgcgccgggcgacgagggaatagtaaatggcgatctcgtcggcgctcttccagttataggggcggtagtcgatatcaaagatcaccaccgtaccccggcgcttggcgatctccagcgccttgaggcaggcctcgcgggaagggctttgcgccagcgccgtgccgctgatcaacagggctttgctgtttgcgatataatcttcgtcgatttcggccgggtccagcatcaggtccgcaatgccgttgcggtacatgaggatgctgctctcagtggggctgaggatctcggtgaaggtcaggccgatcttttcgccattctcgcagggcttgatgtgcgagcagtcgatgccctctttctcgaagaaatccaccacatattcgccgaaccggtcatcagacacccggcccataaagccgatgcgcttgcccagccgggccagccctacggcgatattggccggggagccgcccacgtattttttaaaggtgctgctctccaccagcgtcttaaaataatccaggggattaaaatcgatggccacgcggcccatcaaaaccaggtcataagggcgggtctcgtcaaaggtgatcttggtcatggttattcctcttttcttatttttcatcggtatcctttaaggaaagtgcttgccaagccttcaaataggggtaagaattaaaggcggtctgcccggaatctgcgtacatgccaaagtgcagatgcggcgcaaactggccggatgtcccctccgggccgtagccggtatcgcccacatagcccaatagctggcccttttggactgtgtcaccctcctctagcccttgggcataggcggacagatgggcataatagtaataaacgccatcctcgctctggatccccagacgccaaccgcctaaggtcagccaaccttttttggtgacgacaccgccacagaccgcgtagacaggcgtaccctgatccgccatgatatcgcacccttcgtgctggcggtccccgccaaaggtgcgggattgctgccagctgtccgtataatcgaaatttgcgtccagtggcaacggaaactgtttgccctgaaacacacggtcgatctgattcagggcaacgtattggctccaggcggcatcgccgcccgactggcccaaagcggcacggaagtaatccggcgcctgcccttcagctggctccaccaaagggagcagcgcgcggcattccgctaaccgggcagatagatcttcttcctgtccgcgcgcgtccggaggtgttagcgccaggtacacggcggccacggcccgccaggagatatcctgctccacctcgacggtaaacagctgccccaacaacaggtcgtcaaaggcctgtggcgcataatcctcagcggcgctgtaatagggcgtgccctgttggcagcgggaaaggattatgagcaggagcaggatcaacgcgaatcccaaaagcagatagcgacggtagcgccggttggcaaagcgcaagcgcccaaaatccacggcagggccacgataacgggcgggaaccgctcttggacgggtacggggtacagggtaccttgcgggcatgacagacctccagaataataatcaggagatactgtcggtatttgcctcgtaagccatacggttgagcgcggcgatcagcgccttggcgctggcctcgatcacgtcggtagagatggcgcggccaatgcaaagcagtttgccgcgcttgatgcgcacggttacttcgcccagggcgtccatcccgccggttacggcacgcagaaaatattcttcaagggtaatatcctgtaaggcgcaggcgcgcaacgttgccttaaacaccgcgtctacagggccctcgccacaggcagcctcctgcatgatcaccccttcgcggacaatgcgcacggtagccgtcggcaccgaggtattgccggaagtgatgtggtaatattcaagtacatagcgatcgggaatggtggtcatcttttcgttggccagagcctcaatatcccggtctaatacgtactgctttttatccgccagttctttgaaacggcggaaggcgttttccagtttttcgccgctaagggtaatgcccatctccagcagccgctcttcgaacgcgtgccggccggagtgcttgcccaggacgatgccgttgcgcttgacccccacggtctcgggcgagatgatctcataggtcagcgggtttttcatcaccccgtgctgatggataccggactcgtggcggaatgcattggcccctacgatgggcttgttgggcggaagcgggatgttgcagatgctggagaccagcgagcaggtgcgatagatctgcttatggcagatattcgtttccgtaggcaggtagcttttgcgcacataaagcgccatcaccagctcttccagcggcgtattgcccgcccgttcccccaggccgttgatggtaacgtcgatctgcgtgcagcccgcctggatggccgagagggaattggccacggccagccccatatcgttatggcagtggatggccagttgcacgttttcgatgccgggcacggtattgcgcaggtagacgatcagcccggccagctcctcgggcatggagtaacctaccgtatcggcgatgcaaagggtagtcgcgccggcctcgatggcggcggcaaaaagctgccctaaaaacgccgggtcactgcgggtggcgtcctctgcggagaactgtacgtctttacacagcgccgccgcatgacgcacgctggtgcgcgccgcctccagcacctgttcgcgtgtcatgttcaatttatattccatgtgcaggtcgcttgatgcaataaaaatgtggatgcggggatgcgccgcatcccgaagcgcctcccaggcccggtcgatatccccgggcagggcgcggcaaagccccaccaccgcgcagttttttacggctcctgcgatggtgcgcacggcctcaaaatcgccggtggagctgatggggaagccggcctcgatataatccacccccagcttttccagttgcagggcgatctccagcttttcgtccacattcaggttcagcccgggggcctgttccccgtcgcgcaaagtggtatcaaagatctttatttttctaggctcgtgcatattcttccctgtccttttcttcagcgggtttatcgtttacaactggcaacaggcgttaaggcaaaagcccgcgccacgcgtccaatggccaggatatggctaccgcccggcccacgatcagatcccgcgggatggggccgaccacgctggcccggctatcgtggctgttattgcggttatcccccatgaccatgtaatgcccctcggggatgacgatctcatcataatcctgcaacatgggcgcggcgatatagggttcttccaagggctggtcgtcgatatagacctggccgccgcgaatctccagccgctcgcccggcaggccgatgatgcgcttgataaagatatccttctcgccggggaagtgggtgaccacgatctctccgcgctgcggggtgcaaaagaggttatagatccccttgtcgatcagcacccgctcgtccgaaaccagcgtaggctccatggagggcccctctaccgtaataaattctaccacgtataaccgcagaaaaaaggccatcgccatagccagcacgagggtgatgacccaatccaacccctcgcgcaggcgggatttgcgcttgcgcttttccagcttggccacccttgtggtgggctggtcgaggttcggttcgctgccggtgcctttaggctcttgtatatcgttcatgctttatttccttcactttccgccgcggcagggaaaaccttgcgcacgcgcttttcaaatacattgcgggggagcatcacgatccgcctgcatccgcagcagcggatcttgatgtcggcgcccacccggatgatctcccagcggtcactcccgcagggatggctttttttcgtttgcaccacatcgtgcaggccataagacgctatcatttcgtttcctccttggctggggcgggcatgagctggcgccgctccacggcaaagggcatgccggcctgctcaaaccgctttttgatgaggacgcgcagcctgcgctcggcctcccaatgccccagaggctgggtggttgagaccaggcgcagcgttacgccctctccgccgatatccaccgcgcccaccacctccggtggcttgggcagggcctcgccctgttcgtccgcccaggcagcggccacatcctgcagcagcgtgatggcctgttccacatcccactcgatgggaattttgacatccaccagcgccagcgaattgccgcgcgagaggttgaccacctgctcgataccgccgttggggatggtgaccacctcgccgcgaaagcaccgcagctgggtaacgcgcatgctgatggactctaccgtgccggtaaagctgccgatggtgacatagtcccccacacggaattgatcttcaaacaacaggaaaaagccgttgatcacatctttaaacaaatcctgcgccccaaggccgatggcgataccgccgatgccggcggtagccagcaggctggtggccgcctggcccagccccaatacgcccaaaatcgcgatgatggcgaaaaaatagaccacataccgccagatgctgatcatcagcgtgctggtggtatccagccgcgcatctggcgtttggccaaagggcagctttctgcggtggaaacaagcgtggatgatgcgcgcccccgctttattgagcaccttggccacgataaagatgatcacgatccccaatacgccctttagaatagccgcataggggatctgaagatcccaggggagaaaggtgatcgcgctattggttacggaaaaccagttttccatcattacctcaacttatcatacgatgattttattgttattatatcaaatctgcgtgcaagcaacaaggcggcgctgccgcggctagggtatgccatgcaaaaggggcgcccggcgggcgcccctgcggttttttgtatgctttaattgtcgtatttaaggatcgccttgatccggcgtacgccggaagaggagctttcctcttttttgatgataaactcgcccagctcgccggtgcggttcgcgtgcggcccgccgcagatctccttggaatagccctcgatcgtgtagaccttgaccttttcgccgtacttggactcgaaaatacccatggcgccctgcgccttggcctcgtccacagtcatctcctcgcaaaccacaggcacgtcggccttgatggcctcgttgaccagctgctgcacctgggccagctcttccttggtcaccttacggccgaaggaaaagtcgaaccgcagccgctcggcggtgatgttgctgccgcgctgatacacgtcgtcccccagcaccttgcgcagcgcgccaagcaaaaggtgggtagcggtatgcagccgcgcggtctccacggcgtgatccgccaggccgcccttaaagcgctgctccgcgccggcatggctcttttgctggtggatggcaaaggcttttttaaagccgtcctcatcgacgattaacccgttctcgcgggccagctccaccgtcatctcgatggggaacccaaaggtatcgtataggcggaaggcctgctgcccatcgatcgcggcgatgccgtcgcgggcctttttcagatcgtctgaagcggaggcgatcagctcaaagccctgccgcatgcgggccacagcattttgcaacatttcaaactcaggcaagggtcgcagattggagccgatctgtttggctaactgggtggcttgctcaatgttttcgggattgggcaacacatattcaaacttatccaggttgtccaggaactgtttgatgcgcttgaagatcttctcaaattcccgcatgccctggcgcagcgtgcgctggaaacgggtgacctccttgcccagctcgtcgatgatggcatcgtgatggcggcgcagctcgtcgtagacatcctgatattgggcgatgatcacctcggcgatggcctgaggcgcatcgtcgggcatacccagctgcatgccgaagcgcaccgcccggcggatcaggcggcgcagcacgtacccctggtccacgttagagggggtcacggccttatcgtcacccaggataaaggtggccgagcgcaaatgatcggccacgatgcgcatggcgcgggtgatctcgggagattcgccgtattttttgccgcttaaagattcgatacgggcgataatatcggtaaacagatcggtctcatagaccgatttagcgccgcacagcaccccgatggtgcgctctaagcccatgccggtatctacgtttttatgttccatgggcaggtactgcccgtccgccgtcttgaggtactgcataaacacgttgttccaaatctcaagatagcgtccgcaatcgcaggccggggagcaatctgggccgcagggctctttatcggtgatgtagaagatctcggtatccgggccgcaggggccggtttgtccggcggggccccaccagttgttctcgcggggaaggtagaagatccgctcctcgggcacgccggcttggcgccagatgtcggcggcctcgtcgtcccggggaatgccgtcctctccggcaaagacggatacggcgatccgctctgggtccagacccagccatttggggtcggtcaaaaactcccaggaccagcggatagaatccgccttaaaataatcgcccagggaccagttgcccagcatttcaaaaaaggtcaggtggctatcgtctcctacgtcgtcgatatccccggtacggatgcacttttgtacatcgcacagccgggtgccggcggggtgcttttcccccatcaggtagggaaccagcgggtgcatgcccgccgtggtgaagagcacggtggggtcgttatccggcaccacggaggcgctggggatgcgggtatgtcccttttccacaaagaaatccaagaatttttggcgcagctcattggcgctgatcacgttaaaacactcccttattttacccgcgcgattcaagcgcgggtttgcatcaatactatcgccgacatggccttgggcgaatgtgaatattatacggtagaaaaacccgccgcgtcaagggatggcgccatcggggcgtaaagtttatgctataatgggttaaatgagaagcgctagagcccggatgccgttaaagatgggcgaaaaaggagggtacgcggtggagatatcgatcgttcaaatggattccccattggggaaactgcgcattggcgcgggggcagagtgcctaaccgtgatcgactttgagcagacgcattggctggagttcggcctggaaaagaggctttacacggaagtagcgcgggagttccccctggcgggagaaaccgcgcgtcagctggaggaatattttaccggcacgcgcaagcagtttcaattgccgctgaagctcacgggcagcgcgtttcgcgtatgcgtgtatgaggcgctttgccgcatcccctacggcgaaacgcggacctatggcgaaatagccaaagaactgggcaagcccacggccgcccgggcggtgggcggggcgaaccacgtcaatcccctgcccatcgtggtgccctgtcaccgggtggtgggggccaaggggctggtggggtacgcgccggggctggataaaaaggagtacctgctggactttgagcgcgcacatcgatagtgccgcggtacggtaaagcccggcggagaaatactccgccgggctttatggtttataatgccagggtcagtccgtaacgctttagggcgccttccacatccgcgcgggtaaaatcggccgcccgccactgggatgcgttgagcgcacctaacagacaggccagcttcagcgtatcctcccgcgtatagccgcgggaaaggccgtgcaaaaagccggcggtgaaggaatcgccgctgcccacagggttgacggcttctaccggaaacacgctttggcgcagttcgccctgcgagcttagccagctggccccctgctcgcccctgctgagcacgatgttggggatggtacccagcagttgctccgggccagttgccttgcgggcggatagtagctgagatagctcctgctcgttgggcttgataaaatccggccccgcttcaatgcattgggtcaagccctcatcccggctgtccagccacacttggctgccggatgcgtgcgcccgctcgatcagctcccgatagacccagctaagctccggagcgggcaagcttccctggaggaccacccagtccgtatcgggcagttgggcgtcaaaggcttggaaaaaggcctgccactccgcctcgctcacccttgcgcccggctcggcaaaggcggcctgccggaaggtgccctcctccaccatggtggtgatgcagcgggtctgcccgctgacgggtacgggtatcaagtcgatcccctcttcccgagcaagagcggtgtaccactggccctggatgccgcccgtcagcgccaggcaacggcagggcgtacccaggcgggagagcacgcgggctacattggtgccttttccgccggattgcagatccatacgcccggcacgcgtgaccaggtccagcgtaagcttttccacccatagcgttttatccacgcaggggttgagtacaacgggtaataccatagcggcgcacctcgatcgtttgatttaaactctttttatcctagcgtattttatccatcttggcaacgcatgggaccataaaaaagccggcgctatagcgccggcttcaaaacaattgctttagcttatttcttcattttttcggcaacggctgcggccagcgcttttgcaccttccagctcctgctgggaggggcgcagcttggcgcgcgccgcgggctgaacgatcttaaggccgatggagcgcaggcgctcctcgatcatgggggccgcctcgccggaccagccgtagctaccgaaagccgcgcctactttgtcgcggttcgccagggcggaaagactggtcaaaaactgccagaccggaggcagcgcgtcgcggttaaaggtgggcgaacctacgatcagcgcgccactgttggccgctctggccagcgcatcctccaggctgatctgggtcagatcctgcagatcgacttccacgccggcatcctgcagcccctgggcgatggtctctgccagctttttcgtattgccgtaagaggacacataggccacaaaggcgcggtttagcgccgcggtatccggggcggaaagcttgcgcatcaggtcgatggcctctccaacggcggcgccccgcatcagcgggccgtggctgggcaggatctggtcgatcgcaagtccttccagcttgtccatcgccttgagcatgtaaggcttaaagggggacatgatcacctcgaagtaataggcgcgcacctgggagatgtcatctttcacctcgtcgtcgtactgggcgggggccaggccatagtggcagccaaatacgtcgccagagatcagcgccttgtcctctttgacataggtgaacatggtatccggccagtggaggaagggcgccatgataaactggagggtcttcccgcccaggtcgatactgtcgccgtccttaacgatcatctctttaaacgggcggttggccagctcccgggccagcgtcatacccgcacgggtagcgaccaccgtggcatccggcgcggcgtccagcagtttataaaaggcgccgctatgatccggctcggtatgatccaggatgatatactctaaagaggccaggtccgtcatctcctgcaacgccgcgatctgctcgtcgccaaagccctctttaacgacctcgaccagcgcgcgggccttggtgccctcgataaaataagaattataggttgtcccatattcggtggacatgatgacgtcaaaaatccgcagattgggatctgccgccccaacgtaagtgatgccatccgcgatttttttaggctgaactgctttcattctgattccctccattaaagaaacggtgcccgcccaattgggcgggcaccgcgccttgcccttaaaattgggccttagtcttcctgctcaaaagcatccttgccggcgccgcaaagcgggcactcataatcctcaggcagctgatcaaagggcgtgccctctacttcttcgtcgtaaacataaccgcaaatcgagcaaacatatttcgccattatgagatcccctttctggtattcaacttatttattaggaatttatcctaattgatattataccatattcttcctgtaaatcaagccccaggaatgattttctgcgaaaaaaaccgtcgaatcatctcggttattcacaaccgcatctagtttatgcacaaccttatcaacatatgcacagggttatacacaaattagagaaaaaaacaggcttacgcgcggtgcgtaagcctgtttttagaagttattccgcaaacagcttgttgagctcttccaccaacgcgtccacattgatgccgtggcccatgcaggcctgctccaaagactcgcccgcggacatggggcagccgatgcaatgcatcccggcattcattaacacgggaatggtgcgctggtcgagtttcaaaatatcgctaatgatcatatccttggtaattttagccatttgttttcctccgttcgcgcagtgcgcaaaatttatctcaccgccatcatacacccgcgcggcagggttggcaagctaaattttgctggcggcgcaggaagattcaacgcgctgaggcaatattagccagattacaccctgtgggatatgttataataaatacaaataaagggggtatctgttgtatggagaagatcgcatttggttctactggcatgatggtcacgcgcacttccttcggtgcgctgcctattcaacgggtggaccgggaaacggccaagcgcatcttacgcaaagcctatgacgcggggatcaattttttcgatacggcgcgcggctattccgacagtgaagaaaagatcggctatgctttgagcgatgtgcgccagaacatctacatcgctaccaagacgccggcaaaggacaaagcggggttgatgaaggacctggaaaccagtttgaagatgctcaaaacagactatatcgacctttatcagctgcataatcctgctgatctgcccgacccggaggatccaaacgggctttaccaggggctgctggaggccaaaaagcagggtaaggtccggcatatcggcattacggcgcataaacccgccaatgcgcacgcggctatcgaatccggattgtacgaaagtttgcagtttcccttttcttcgctggcttccgatggagacatcgagctgacccgcaaatgcaaggccgcggggatgggctttttggctatgaaaggcttgtcgggcggcttgattaccaatgccgcttccacctttacctttatccgccagtttgaaaacgtggtgcccatctgggggatccaaaaggagagcgagctggacgagtttatcgctctggcggctaatccgcctttgcttgacgacgagatgaaggccgtaatcgagcggaaccgcaaggagctggctggcgcgttttgccgggggtgcggctactgcctgccctgtccggtcaatatcccgatcaatatggctgccaggatggaggggttgatcacccgctcgccctatgcccgcttcatatccaagagctttcaagcggagatggcgcggatcgactcgtgtatcaactgcggacactgcaaaaaccattgtccctatggtctggatacgccggcgctgctgaaaaagcagttgagctggtatcgtgagtttgtccaggcccaccaggatgaggtgaccgagtaaagcacaaaaagcagcaggcatcgcctgctgctttttgtttgtgtctttctcgaattaaaagaggaattcatccggatgcgcgcctgtgcgcccgtcgcgctccagcgcgtcgatggcggccatatcgctttgatccagttcaaagccgaacagatcgctgttttccagaatacgggcgggcgtggcagatttggggatgacccggatgccgtgctgcagctcccagcgcaagatcacctgggcattggtcctgccgtgcttttgtgcgatggcgctgaccgtgggctctgtaaaagcggcgccgccccgcatcaggggggaccaggcttctacaaggataccatggccttggcagtaattgatggcctcgcgctgccacagatagggatgcagctcaatctgattgaccataggcatgatctcggtttgctggcgcagggtctctaggtgatgggggagaaagttggatacgccgatagcccggacccgcccttcgcgatagagcttctcaaaggccttccaggtctccacatagcggtctttgccgggccaatggatcaggtaaaggtccagatagtccagccccaggcgcgccatgctttcatcaaaagtacgcagcgcttcatcatacccatggcggtcgttaggcaatttggtggtcacgaaaatgtcttcccgtttcaggccgctttcacggatgccctgtcctacgccggtttcatttttataaagcgccgccgtatcaatgctgcggtagcctgcgcgcagcgcgtaagccacgcagtcccgggcctgttcggtatcttgcagcttataagtgccaaaaccaaggctggggatggtgacgccgttatgtaaggtatagtaaacaatactcatgcaaagcccctcccaatcgttcttctatcctccatgatagcccataccagccggaaaggaaagcggtttttggccgatcctgccaaaagggaaaaaggaactggacaggggggcagaacgtggtaaaatatgtttgaagagaccttcccccgccaagtgggcgggcaaacgcgccgggggcgccctatttaaaggaggaaaagggatggattttcaaaaacgttatgatacgtggtgtcaggcgtcctggatcgatgcgcaggctaaagcggagctgttggcgattgcgggggacccggcacagatcgaagatcggttttatacggacctggaatttggcacggcgggcttgcggggcgtgatcggcgccggtaccaaccggatgaacgaatacgtggtggcccgggccacccaggggttggctgaaacgattctggaggcggacgcggatgcggcaaagcggggcgtggtcatcgcttatgattccaggttgtattctgacgtatttgcacgcattgccgcgcaggtactctgccaaaatgggatcaagaccttcttgtttgatgaattgcgccctgttccggagttgtcgtttgccattcgttatttaaagtgcatttcgggtatcgtcattacggccagccacaatccgccggaatataacggctataaagtctattgggaggatggcgggcagcttcccccggagccggcggcggtggtgctgcagcacatcaacgcaatcgaagattatggaagcgtcaaacggatggacgttgagcaggccaaagcccaagggctgctggagatcatcggcgcgcaggtggatgacgcctatattgccgctgtaaaggaactggcggtggcgcccgagcgcacggcggcgatcgcagacgattttacggtgatctatacgccgctgcatggttcgggcaacaaaccggtacgccgtattcttaaggagataggggtcaaaaacgtgcatgtggttccctctcaggaaaagcccgatccggcgttccccacggtggtcgcccccaatccggagcgcagcgatgtctttaccgaggcgatccagatggcccaggagttggatgcggatattattatcggcacggatccggacgcagaccggttggggctggtggtcaaagatgagcaggaccgctatttcccgctgacgggaaaccagatcggcgtgctattgctacattatatattggaagcgaaaaaacaaaagggcgtgctgccggccaatggcgcggtggtaaagtccctggtttcaacgtctatggctgcggccatcgccgcagattatggcgtagaactattcgacgtgcccacgggatttaaattcattgccgagaagattcagcagttccagacgacgggggattatactttcctgttcggctttgaggagagctttggctatctgtccggcacaaaagtacgggataaggatgcggtcaacgcggcgatgctggcggtagaaaccgcggcttattataagcagcgggggatgacgctgtatcaaggcctgcaggagttgtatgagaaatatggctattttgttgaaaaggtggatagctacacctttactggcgtagagggcatgcaaaaaatccgcagcatcatggaatatctccgcgagcatacgccatcatcgatcggcagcttctttgtggccgcggtgcgggactatctttcgggggtccgtacggttccgggagacggctctgagcagccgctgagcgataaggcggggaatatgctgtactatgagttgagcgggcgcgcattttccgtcatccgtccgtccggcacagagccgaaaattaagatctattatgccgtttccgggaaaacggcgcagcaagcgcagcagcagttacaggatatgcaatcgggctttaagagcatattgaagggttatatcgactgatttcgcccgaattcattaaaatccgaacattattattaaaagaccgatatcctccggtataatgccggacgatatcggtctttattttgtaaaggatagttgtcaattgtgtatagattctatataatcaaaggatccggtcggatatggattgctcgagcaaatggatataaaaaaatcctaaataatgcttgacaaaggatatcccctgtggtaatctaagtaagctgtcgcacgggggagtccccagggcggcaggaaagacctttgaaaactgcacagagaagagacgaaataacaagaagttctgaagtaagtaaggtaagcggaaacggagaggactttgagtaaagagccaaagagcaggggagaggaaacgaagccctgcttgaataaaaggattaaattgaagagtttgatcctggctcaggacgaacgctggcggcgtgcttaacacatgcaagtcgaacgggagaggatgaggaaatgcttcggcatggagacatccgatctagtggcggacgggtgagtaacgcgtgagcaacctgtcctgcacagggggataacactgagaaatcagtgctaataccgcatgagaccacagtatcacatggtacaggggtcaaaggagaaatccggtgcagggtgggctcgcgtcccattagctggttggtagggtaaaggcctaccaaggcgacgatgggtagccggactgagaggttggccggccacactgggactgagacacggcccagactcctacgggaggcagcagtggggaatattgggcaatgggcgaaagcctgacccagcaacgccgcgtgaaggaagaaggtctttggattgtaaacttttgtcctatgggaagaaggaagtgacggtaccatgggaggaagccccggctaactacgtgccagcagccgcggtaatacgtagggggcgagcgttgtccggaattactgggcgtaaagggcgcgcaggcggccgatcaagttagatgtgaaatacccgggcttaacctgggaactgcatttaaaactggttggctaggagtgcaggagagggaagcggaattcctagtgtagcggtgaaatgcgtagatattaggaggaacaccagtggcgaaggcggctttctggactgtaactgacgctgaggcgcgaaagcgtggggagcgaacaggattagataccctggtagtccacgctgtaaacgatgaatactaggtgtagggggtatcgaccccccctgtgccggagcaaacgcaataagtattccgcctggggagtacggccgcaaggttgaaactcaaaggaattgacgggggcccgcacaagcagcggagcatgtggtttaattcgaagcaacgcgaagaaccttaccaggtcttgacatccctcgaagtgcatagagatatgtacgtccttcgggacgaggagacaggtggtgcatggttgtcgtcagctcgtgtcgtgagatgttgggttaagtcccgcaacgagcgcaacccctacagttagttaccagcgggtaaagccggggactctaacaggactgccgtggataacacggaggaaggtggggacgacgtcaaatcatcatgctccttatgacctgggctacacacgtgctacaatggccggtacaaagagaagcgagaccgtaaggtggagcggatctcaaaaaaccggtcccagttcggattgtgggctgcaacccgcccacatgaagttggagttgctagtaatcgcgaatcagcatgtcgcggtgaatgcgttcccgggccttgtacacaccgcccgtcacaccatgggagttgggagcgcccgaagtcgttgaggtaacccgcaagggagccaggcgccgaaggtgagaccgataactggggtgaagtcgtaacaaggtagccgtatcggaaggtgcggctggatcacctcctttctagggagaagatgggagacggaagaacgtctttcaaactccggtcgagcgtatcctttgggatacggaaaaagaggaaaagaagaaatcaaggcttaaacgagaaggtctcggaagaggaagctgagaagaaagcggaagagcgggagatatttcgtgtctgacctgtgcagttttgaagggtcttaagagaaccttcagattgtcctttgaaaactacatcaaagaagcaagaaagcgatagaaacgaaaagaacgtaagaaagaaatctagtggagttgctgtaaaggtaacgaaacgggaagaaatcgaacgggaaactacaatttcgctttgagagaaaggcttggaggaatccaagcaagggaaaaagacgatcaagctagaaagagcacagggtggatgccttggcaccaagagccgaagaaggacgtggcaagctgcgaaaagccatgataagctgcaagcaagcgtaatagtcatggatgtccgaatggggaaacccagtggaggcaatgctccactacccgcggatgaacacatagtccgtgaggagggaacccggtgaactgaaacatctaagtagccggaggaaaggaaagaaacatcgatttcctaagtagcggcgagcgaacgggaaagagcccaaaccgcaagactacggttttgcggggttaaggacccgcgtaatctgggaagaacatagccgaatagggttggaaagcccaaccaaagggagtaagagtctcgtaggtgaaatgttttgaaggaggcggggatccagagtaccacaggacacgaggaatccggtgggaagtcggggggaccaccccccaaggctaaatactacttggtgaccgatagcgaatagtaccgtgagggaaaggtgaaaagtaccccgggaggggagtgaaagagtacctgaaaccctgtgtttacaagcggagggagcacgatctaggtgcgacctcgtactttttgtagaacggaccggcgagttacgttgtgtagcgaggttaaggcataaagtgctggagccgaagggaaaccgagtcttaatagggcgacaagttgcatgacgtagacccgaaaccaggcgacctatccatgtccaggttgaagtgggagtaaaatcccatggaggaccgaacccacgtctgttgaaaaaggcggggatgaggtgtggatagcggagaaattccaatcgagcttggagatagctggttctcctcgaaatagctttagggctagcctcataaatgattaccggaggtagagcactgaatgggctagggggccacaaagcttaccgaaccttatcaaactccgaatgccggataattgaattatgggagtcagactgcgggagataagtttcgcagtcaaaagggaaacagcccagaccgtcggctaaggtcccaaagtgcaggttaagtggaaaaggatgtggaattgcacagacaaccaggatgttggctcagaagcagccacgcatttaaagagtgcgtaatagctcactggtcgagtggttctgcgccgaagatgtaacggggctaaacctgccaccgaagccacggaacagaaatgttggtagaggagcactgtatgcgggcagaagcggtaccgaaaggagccgtggactgcatagaggagagaatgccggtatgagtagcgagagaatggtgagaatccattccgtcgaaagcctaaggtttcctgaggaaggctcgtccactcagggtaagtcggggcctaagccgaggacggtagagtcgtaggcgatggacaacaggtagagattcctgtaccaccgaagggtgtttgactgaagcagtgacacagaaggttgaccgaagcagggtgatggacagccctgtccaagcacagagtctttggcgtagtgaagtacgcgtcaagtacggatgatgtgtgatggggactgaaattagtagggaagtcgggtaaatcacgctggcgagaaaagctgctaaggaatccggaggtgcccgtaccgcaaaccgacacaggtaggcgaggagagaatcctcagacgagcgggataacccttgttaaggaactcggcaaaatgactccgtaacttcgggagaaggagtgcctcgaaagaggccgcagagaagaggcccaagcgactgtttagcaaaaacacaggtctgtgcgaagtagagatacgacgtatacgggctgacgcctgcccggtgctggaaggttaaggggaaatgttagggcaaccgaagcatagaaccgaagccccagtaaacggcggccgtaactataacggtcctaaggtagcgaaattccttgtcgggtaagttccgacccgcacgaatggcgtaacgatttgggcgctgtctcaacaagggacccggcgaaattgtagtatgtgtgaagatacacattacccgcgatcggacggaaagaccccgtagagctttactgtaacctgacattgggttcgggtaatggatgtacaggataggtgggaggcattgaaaccaggacgccagtcttggtggagccgctgttgggataccactcttccgttgcctggattctaacggctggccgtaagccggcagctggacagtgtcaggcgggcagtttgactggggcggtcgcctccgaaagagtaacggaggcgcgcaaaggttccctcagaatggttggaaatcattcgcagagtgcaaaggcagaagggagcttgactgcgagagagacatctcgagcagggaggaaactcgggcttagtgatccggcggtagagagtggaattgccgtcgctcaacggataaaagctacctcggggataacaggctgatctcccccaagagtccacatcgacggggaggtttggcacctcgatgtcggctcgtcgcatcctggggctgaagcaggtcccaagggtttggctgttcgccaattaaagcggcacgcgagctgggttcagaacgtcgcgagacagttcggtccctatccgtcgcgggcgcaggatatttgaaaggatctgtccctagtacgagaggaccgggatggacgcacctctggtgaaccggttgttccgccaggagcatagccgggtagcgaagtgcggaagggataaacgctgaaggcatctaagcgtgaaacccaccttaagatgagatatcccattccgaaaggaagtaagaccccttgaagacgacaaggtgataggccaggagtggaagtgcagtaatgcatgtagcggactggtactaataggtcgagggcttgatcaaaggaagttgtagtggaagagtagtggaaattgcagaaagctgaattgatgtagttttgaggggataaaagaggaaccctcgaaggattccggtggcgatggcgaaggggaaccacctgttcccataccgaacacagaagttaagcccttcagcgccgatggtacttggctggtgacggcccgggagagtaggacgctgccggatgttatggaacagcgctgcgcatgagcagcgctgttcctttttttgctacatttctctaaagtcagagccgccttgtattcccgccagacgcaatggtataatggtgtatagtttcagtaatatattgccgcatggggggaagaacgatgacgacacagaacgagttgttgcaatactttgccaactgcccaatcaacagtacgcactcgcatcatttaaaagatcatgagttcggtgatatttcattatttaaaatcatctctaggacttacgtgaattggatcatgaacgattttctggaggatggggaggctgcccgccagaaatttttggaaaaataccgctgtaatagctatgcgacctggctggtgcgtgcgatcgaggatatttattctgttggggttccgctatcgctggagagctgggacgcttatgacgaagcgattcgccaggcttatcaatcgggcgagcaccatttggatatcctgaagaaccagtgcggctatgcgcgcgtgatcttggataagtatgacgatccaggctcggacaacgggcatcccgatctctttgccccgaccctgcgctgcgacgccttctttaatgggtacgatcctgcgctgcgcagccatgacggcgtgagcgcatatgattatatccgctttcgggagaaaatgtccttgacggaatacatcgcggagatgaagggatatatccgtcaatgtgtatcttcgggcggggtgatcgcccttaaggtcggcatggcttatgagcgcgatcttcactttgacaacagggaaaagacgcgtgccgttaaggcgtttttaaatcctcaggcaacggcagaggaggtatgcgctttccaggactatgtcatgcataagctgctggaattggccgcggaacttggattgccggtgcagatccataccggccttgcctcgctgaaggggacgaacgccatggcgctgtgcaatttgatcgaggaatacccctccgtccggttcgaccttttccacggctccttcccctggacggacgatattctggcgctagcgcacaactttaataacgtttatgtggatctgtgctggctgccgatcatctctaccacccgtgcgatagcctttatcaaggaggcgctggaggtcacggatgcggagcggatcctgtggggctgcgatacctggacctcagaggagagctacggggcggtgctggccggccggtattgtctggctagggcgctgggcgagcttgtggatgaagggcgctttgatgtggcctatgccaaacgtttgggggtcaatatcctctataaaaacgctaaagcgctgtttgagctttcaatgtaaaaagaaaaagccccgccgtgtgcggggctttttataaattcgtccgtttaagccatccagggatctacgatatacttgcccttggcgcgcagcgcaggatcggccagcacctctttcagtttctccagcgagcagacctccgcaaccatggaggtaacgtcgatcttgccggactggatcaaatccaccgcgcgcgtttgcgtgtagggattgatgtaggaagctttgagtaccacttccttttggaagatttcaaacggcttgatgggcacttcgtcatccggcttggtcagcccgaacatcatcacagtggattgcttgccggcaaggtcaatcgcctgggcgatggtggacttgaggcctgcgcactcgatcaccgcattgatgcgccccacatgatgggccgccagcaccgcttttacatcctcgcttagcggatcgatgcagagatccgcacctaacttggcccccatctcgcgttttacggcgacgggctcgagcaggattaccttatgggcgcccgcgattttggccagctgtaccataatcagaccgatcatgccgccgccgatgaccatgacgacgctgccgggctgcacatcgcacatatcaaagccatgcaggcagcaggctaccggctccgccatggcgcaggcgaccagcgaagcctccggcaggagtttatagacctgttttttatgcacgctgcagtactgggcgaagccaccatccgtcgtggtgccgatcccggtcatatgctcgcaaaaatgagcgataccgttgcggcaatagtagcattccccacaggtatcgttcgggtccacgcacaccttgtcgcctacggcgatatctttgacgttatcgcccaccgcttcgacaatgcccgagaactcatgccctaggatggtcggaggcgtaacgtcggccgcgcccttgtccccttcgaagatatgcacatctgtcccacacacgccgcaggcggcaatgcggatcaatacgtcatccgcgcccaccttgggctggggcgcctcctcaatgcgcacatcgtgtttgccataaaaaacagcgcttttcatgataatccccctaaaaataacgttaaggcagtggttgccatacagcaatattatagaccagccggcgatggggcacaaggggcaatgccggggccggggcgtgtggcggaaggattatttcggcatctatgggagcggggcgatagaaattgcctggcgctgttgcattgtttgcggcgcttgtgttatcttaagaacagtacaaaaaggccggatttggccgttctacaaaggaagggtcgtaatatatggtagattttaagacgaacatcgcccaggctttggcaaaggagaccggtgtggactgtgagcagctgtgcggatggctggaagtgccgccggagcgggagatgggcgactatgccctgccctgctttaagctatccaagaccatgcgcaaggcgccgccggtaatcgcccaggcgttgcatgatgcgcttaccccgcagcaggaggcgctttgcttagagcggatcgaaacggtgggcggctacctgaatttctttttagataaggcgatggttgcccgcgaagtggtaagcgaggtgctgcaggccggtccgcgctatggcggcagcgataagggagaaggcaagacgatctgcatcgattattcttcgatcaacatcgccaagcgctttcatatcggccacctttctaccaccgtactgggcaacgccctgtataaaatctatcaacacttaggctacaaatgcgtggggatcaaccacctgggagactggggaacccagtttggcaagctgatcgtggcgttcaagcgctggggcacccgcgaacaggtggaacagggcggcgtagacgctctttctgaattgtatgtgcgcttccaccaggaggccgaaaacgaaccggctttagaggatgaagggcggtattggtttaaaaagatcgaggatggcgatcaggaggcgctatcgctgttcaactggtttaaggagctgacgcttaaggacgcgcagcgggtttacgatctgctgggcgtacattttgattcctatgcaggggagagcttttataacgacaaaatgggccgggtgatcgacgagctggaggccaagggactgcttaccgagagccagggcgccaaggtggtggatctttcggactataacctgccgccctgcctgatccttaaaagcgatggggcaacgttgtacgccacccgggatatcgcggcggcgctctaccgcaaggatacttatgactttgacaaatgcctgtatgtggtcgcttaccagcagaatttgcactttgcccaatggttcaaagtggtggaaatgatgggatacccctgggccaaggacttagagcacgtggcctttggcatgatcagctttgagggccagaccctttccacccgaaaagggcatgtggtctatctggacgagctgctggagcgcgcggtggaaaagactcgtgcgatcattgaggagaaaagccccgatttggaggataaggacgaggccgcgcgccaggtaggcatcggcgcggtgatctttaacgccatgcaggcgggccgcattaaggatatcgatttttggtgggatcgggcgctgaatttcgacggcgagaccggcccttacgtgcaatatacccacgcgcgttgctgcagcgtgctgcgcaaggcccagggatatgcgctggacgggcagacgcagtgggaccagttgaccgatgaggaagcccaaaagaccatcatgctgctgatgcgcttcccggaggtcgtagaagaggcggctttgcgcaacgagccctctatgatcacccggcatacggtggaaatcgccaaggcctataataagttctattatgaacaccgcattttggatgaggacgaaaaagccgctgtggcgcggctgcagttgacccgcgccgtgcgccaggtgatcgccatcggcctggggcttttgggcattgaagcgccggaaaggatgtaagagcggtataagcaaaggaggttgggggggatgaacgctgcacagcgacgccaggcgattatgcgctgcctgaaccgggagccggatgcgattaccgccagcgccatggcggcgatgttctcggtcagccggcaggtgatcgtacaggatattgcgatcctccgcgcgggaggagccgatattctggccacgccggctgggtatatcgtcccccgcgccagttttttgaagcgcccgcgccgggtgatctgctgtaagcacgagcgggaagagcaaatggtggaggaactaatgaccattgtgcgcctgggcggctgtgcggtggacgttacggtggagcatccggtctatggagaatttaaggccatgctgatggtgggcacggagcgggacgtgaggcgctttatcgcccgcctgcgggaaaacggcgccggaccattgagcgcgattaccggaggcttacacctgcatatggtcgaggcggacagtgaagaggcactcgataagatcgtggcggcgttggctaaggccggcatcttgcagatgcagggagaagagcaatagtatagaagaatgatgaatgaaaaccgcggaggtctgagcgcctccgcggttttttgcatatcacacgagacgatgaaaagatgtctgatgaaaagaaacggatataaaatgcgcgataattgcagccctcgcaaaggttttagcgcagggatgtacgatatttagcctgacgtccgcataaataaatatagtaaacttagtcgtaaaaaattgtgaatttttagggcaggaatttgttgaaaaaaattgaatcaatcacgatataagccctggagaaaaaagacggggtaacctagttcaagccgggaaggggggagccgttccggcggtgaatttaaggaggaacggtatgggggtaacgcttaaaaaaactggagtcctggcggtactggtgtcgctttgcctgacggtgaacggctgcttgctcttacctaaggaagaggaggcactggcgccgccgctgatcgagcctgaagaggtagaggtgcagaccgaagaggtgacgctgggaacgatagaaaacaagctttcggtgtcggcgtcgtttatgtcgtcaaagttttccgtactttcttttcccatcagcggatacatatctaaagttaacgtatccctgggggatgaggtgaaaaagggcgacgtattggccgagatggatgtggaaagcctcaaaagcagcctgcgcaaggcgcagattgagctgaaatatgcgcaaaaggaattgaatgaggcgccggacagtaccaatgcgcaaaagagcgttgcgctggccaaggaaaccgtaagcgacctgcagcgccagatcaaacagggacagctgacatcggggatgaacggcaaggtcacggcagtggatgaaaacctgtcggcggggatggcggtgcagccctttaaagaaatggtgcgcatccaggaggatggtacgctgcagctgcgctttgaagggtcggacgcgacttctttccgcccgggcatggcggtggaggtaacggtcaacgaccaaagctatacgggcacggtggtgaccagccccagcaatgctacggaaaaggaagatggcaagccggccaatatcgtgatctttgacgtggaagggctggattatgccaccgtcagcgaggggcagacggcctctgtggtggccgtgctggagcgcaaggaggatgtcatcgtcctgcccaagaactatgtcaacacctatattggccgccaatacgtttacgtgatggaggacggcgttaaagtcgagcgcgacgtcaaggtcgggatggagaccaccggcgaatatgagatcctggaagggctgaatgtaggggatctgatcgttaagcgataaataagggggacgcgccatgtttttaatggtcgtgcgcaagatgcttaacaaccgctggatggttttgtgccttctgatcgggatcaccatcgcagtggccatggtcagtacggtacccatgtacacggacggcgttttgcagcgcatgctaatcaaggatctggagagctatcaagaagagtccgggaattacccgggcacactgcatatcaaagcggacctttccagccgttttaccaaccaggatgagcggctggagggctatcacgcgctgaaaagtcaggtgaccgagcggctggaaccagccatcggcctgcccagcgcggatacgacctgcgtttattggctggattatttgacaggcctgcccaaagaacagcgcagcgaaaatcccaagccagtctattttaaactaaacggtataccaggctttgaagaacaagttaatgtccttcaggggcgcttgcccgctgcagaaaaggatgcggaaggcgtctatgaagtagtggcctttaaaggggcgatcaacgataacgatgtaccgttggatgtggtatatgagctgagccatagccagatggatttggatgtgccgctctatgtaaaggtggtcggagtggtcgagccgaaggagggcagcgaactgttctggtatgacggggagcgcaccaccgcgggcggctttataatgaacggggagctgatggagcgggaattgatcgagcgcgagcctacgctgctgaccatcgtacagtggaattacgcgctggactatcatgccatcaccctttccaacctgcgcgatgtgatgatcggcctacagaatatccagcgcgagctggggccctataaggagatgggcattacctactccatgcctacggtggagctgctcagccaatacctcacgcgggctgcccagctgagcactaccctgctggtcttgcaggtgccgatcctgctgatgctggccttttatatcttcatggtggctcagctgatcgtggactacgagaaaaatgagatcgccgtactgcgcagccggggcgccggaccgggccaggtgtttaacagctacctgatcgaagggctgatcgtggcggccatcgccatgttgatcgggccgctgatcgggttgggactatgccggatgctaggcgcggccaacggctttttggagttcgtacagcgcacggcgctttcattagagcttacgggcaaggtctacctgtacgcgttgtacgcggcgctgttctctgtggccacgatgctggtaccggcgctgctgtcctgccgggtttctatcgtggagcataagcggcgcaagagtgagcgcaagcataaagctttctggaaaaagtattttctggatgtgttgctgttggccatctctggatacgggctctacgcttatcaaaaccgccagcagattctggagctgacgggggcggccagcggcgatgtgcccattgatccgctactgtttctgatctcctcgcttttcgtgctgggcgcggggctgctgctattgcggctttacccttacgtgatccaactgatcttctatttgggccgcaagatatggtccccggtgatgtacgcctcgtttatccaagtggggcgcagccgcggccaggagcaatttttgatgatctttctgattttgacgctggctaccggcattttcagcgccaatacggcccgcaccatcaaccgcaacgcagaggaacagatacgctatgaaaatggctgcgatatcgtagccatggctaaatgggaaagcaatgaagatagcctggccgcatcgggccagagcagcgaggccgtcacctaccgggagccgccctttgctcagtacgagggcatctcgggtatcgaggcggtgaccaaggtataccgcaacggcgaggtgctggtcaagtttggcgaccagaacaagaccggcaccacgatcatgagcatcgtacccagtgaatttggaaaggtggcctggttcagaaccaatttgctgcccacccactggtacaattatttgaacttgatgacggaataccccaaaggcgtactgctctccaaaggctatcaggagatgggcatacaggcgggggacaccatttactacagctgggcgcagcaaaatatgcagcaagctgtggtgttgggctttatcgactactggcctggcctgaacccttatgaggacccctactttatggtagccaactaccgtaccatcgagctgaatatgcgcatagaaccctatgaattgtggatgaaacgggcgcctggcgcggatgcggaacagatttacgcggacgtacaggccaaggggttggccttcacctcttttgaggataccacccagcagctggtcaccattaaaaacgaccccatgctgcagggcaccaacggtgcgctgacgctgggctttatcgtgaccattctggtcacggccatcggttttttgatttactggatcatatccattaagagccgcgtgctgcaatttggtatcttccgggccatgggcttgtctgttaaacggctgatcggccttctgttggccgagcagctgctgatctccggcgtggcgatcctgctgggcatcgtgatcggcgggcttgccagcgagctgttcgtgccgctgctgcagatgatctacgcttccgcgcagcaggtgccgccctttgcggtggtgatgtcgtccagcgattacctcaagatctatggaatcatgggcgtggtgctggccatcggctttgcggtgctgggcgtgctggtatccaagatcaagatcgcccaggcgatcaaactgggggaggaatagtatggaaccgatcatgaccacgcagggcctgtgccgggattttcagaccggcagcgaaaccgtacacgccctcagagatatcaacctgagcattatgcctggggagctgaccctgctccggggccgctccggctcgggcaagaccaccctgatgaaccttttgagtacgctggaccggccaaccgccgggcagatcctctttaacggccgggacatcaccacgctgccagaccgggcgtgcgacgagatcaggcgcaaggagatcggctatattttccaatccgtggcgctgatctcgctcatgtcggcctatgagaacgtggagttttccctgcgtatttccgggtatcccgcaaaagagcgccagcagcgggcagaagaatgccttaattttgtgggcctgggcaagcggatgaaccaccggcccagcgaactttccggcggcgagcagcagcgcgtggccatcgcccgggccttgagccaccggcccagcgtgatctttgccgatgaacccacggcggagctggatacccgcatgggtttgcaggtcatgcgcattctttgcaatttggtggagcaggagggcgttacggtggtgatgacttcgcacgacccgcagatgggcgagattgccgaccaggtgatcaccctggccgacggcgagatgatcgaaaccttccgcaacgaaaatgccagaggggggtggcaaagatgagcctgatgatcgattgccaaaaccttgttaagatctataagaccaaggagatcgaagtggtggccctgcaagggttggatttggccgtggaagagggagagttgatggcgatcatcggcaactccggcagcggtaagtccaccctgcttaacatgctgggcgggctggaccggccctcggccggcaagctgattatcgacaaccgagatatgctcaagttcaccgaaaaggattacatcaagtacaagcgcgaagtcgtaggttttatctggcaaaataatgcccgcaacctggtcccctacctgacggcgacggagaatatcgagctgcccatgattttaaagggcaagcgggaccgggggcgggcgctggagctgctggatatggtgggtctttctcaccgcaaaaaaagcaaactcaaccagctttccggcggtgaacaacagcgcgtggccatcgccatcagcctggccaacgatccacggctggtactggccgatgagcccaccgggtcggttgattccagaacggccagtacgattttggatatttttcgggatatcaatagggccctgggggtgaccatcatcatcgtgacgcacgatatgaacctttcccgccaggtggaccgggtggtagccatacgggatgggcgcacgtccagcgagtttatccgccggcgctcgatcttagacgagatgcgcgaattggaacaggaggaggccgcccagcagcaggagcaggtggagtacgcggtactggatcctgccggccggctgcagattccgcgggattatctggacgcgctgggcgtcagcgggaaaaacaagatgcgcgtggagctggaggagggacgggtcgtcctgctgccgccggatgcggaaacggagcaacacaaagaagcataatgccgcgggctgcatgtatctgctatcgcggcgataaaggaggaatagggatggcacagcagtttccgagaacggaagtagggggaatctcacttccgcggatgttgatcggcaccaactggatcctgggctacagccatacgtctgttgcggcggatcaccagatcacccgcatgaacgggagtaaagaggctattgcggatatcatctgtgcgtttttaacgtatgggatcgacgcgatcatggcgcctattgcaaccaacccggtgctgatggatgggatcaagctggctgaggaccggacggggcagggaatcattcggatcgacacgcccatcgtgaatgtagacgataacgcgcaagcgcgccgggaggccgaagccacatttgaagcttgtcagaaggcggggtcgcagttttgcctgatccatcacagctctgccgagcagctggtcaataaaaataagaagatcatcgaccggttgccggattacctgtcgatgatccgccaacgggggatgttgccggggctctcggcccacatgccggagttgattttgtattcggacctgaacgaatacgatgtggaaacttatatccagatcttcaactgcgtgggctatatgatgcaggtagagatcgagtacatcctcaaggtgatctgggaggcgaaaaagccggtcatgaatattaaatccatggcggcggggcgggtctctccgtttgtagggatcacgtttaactacgccacgcttcggccgcaggatatggtcaccgtcggctgcctgacgccggaagaggtgcatgaggacgtcgaaatcggctttgcggcgatcgagcggcggttccccaacctggagggacgttccagccccaataagacggacattatgggtgaaggcttggaaaagaaatagcgtataataaagcggtccggctaatgccgggccgctttgcataatttaaagtttaaaagaaaaggcggaaaacgaattgatccagcagcagtaaaacggttagaccgccaagataataggcaaagtactggagtttaccccgggctaaaattttgagcaggagccggatcgcggcgtagccggccagcatggcagccagcagccccatgatcgccccccaaaagtcaaccgtaggaacggcctcgctaccgatcagcatgaaaccttcgcacaacaccgagatcaacagagaaggcgcgctgagcaggagcgcgaaccgcagggcaaaggggcgctccagtccgctggccatggctgcggaaagggtagagccaaagcgggaaaggccggggatcacggccaggatctgggaaagaccgatgatgccgctctccttccaacaaaattgtttgagctttttctcgccgttgtcaaaaaactggccggcggcaaacagcgcaagccccgtgatcaaaaagccgatggccagtaccagcccttgcacgttgctctgctgatatgctgaggcaaaaacgccgcccaataaaaggatggaaaccaaaagcggaacggtggcgatcaacatcatatacatcagtttgtggcgcggctggcgcacgagcatccacagatctttccaaaatattgcgatgacggcggccaacgcccctaagtggaacatcatcgtcaaaagcgtgccgctttccggcgtgcccaaaatgtgctccattaaggaaagatggccagagctggatacgggcaaaaaggccgtaaagccctgcactaaccccagaagaatggcttgccatatggccataattgaactacctctttcttgcaacaattgtaacatttcgttgttattataccgggcgcggcaggttcccgcaagctattcttcgttttttcggctatatcgcatggcgggccgctcttattactggaaaaacccgcctatagcgtgtataatttggcagcaaaaggagaaaaatgcagttgtgtaaaaaagtttaataaatttgcatttttaggcttgacacaaataagcccctgtggtaatctaagtaagctgtcgcacgggggagtccccagggcggcaggaaagacctttgaaaactgcacagagaagagacgaaataacaagaagttctgaagtaagtaaggtaagcggaaacggagaggactttgagtaaagagccaaagagcaggggagaggaaacgaagccctgcttgaataaaaggattaaattgaagagtttgatcctggctcaggacgaacgctggcggcgtgcttaacacatgcaagtcgaacgggagaggatgaggaaatgcttcggcatggagacatccgatctagtggcggacgggtgagtaacgcgtgagcaacctgtcctgcacagggggataacactgagaaatcagtgctaataccgcatgagaccacagtatcacatggtacaggggtcaaaggagaaatccggtgcagggtgggctcgcgtcccattagctggttggtagggtaaaggcctaccaaggcgacgatgggtagccggactgagaggttggccggccacactgggactgagacacggcccagactcctacgggaggcagcagtggggaatattgggcaatgggcgaaagcctgacccagcaacgccgcgtgaaggaagaaggtctttggattgtaaacttttgtcctatgggaagaaggaagtgacggtaccatgggaggaagccccggctaactacgtgccagcagccgcggtaatacgtagggggcgagcgttgtccggaattactgggcgtaaagggcgcgcaggcggccgatcaagttagatgtgaaatacccgggcttaacctgggaactgcatttaaaactggttggctaggagtgcaggagagggaagcggaattcctagtgtagcggtgaaatgcgtagatattaggaggaacaccagtggcgaaggcggctttctggactgtaactgacgctgaggcgcgaaagcgtggggagcgaacaggattagataccctggtagtccacgctgtaaacgatgaatactaggtgtagggggtatcgaccccccctgtgccggagcaaacgcaataagtattccgcctggggagtacggccgcaaggttgaaactcaaaggaattgacgggggcccgcacaagcagcggagcatgtggtttaattcgaagcaacgcgaagaaccttaccaggtcttgacatccctcgaagtgcatagagatatgtacgtccttcgggacgaggagacaggtggtgcatggttgtcgtcagctcgtgtcgtgagatgttgggttaagtcccgcaacgagcgcaacccctacagttagttaccagcgggtaaagccggggactctaacaggactgccgtggataacacggaggaaggtggggacgacgtcaaatcatcatgctccttatgacctgggctacacacgtgctacaatggccggtacaaagagaagcgagaccgtaaggtggagcggatctcaaaaaaccggtcccagttcggattgtgggctgcaacccgcccacatgaagttggagttgctagtaatcgcgaatcagcatgtcgcggtgaatgcgttcccgggccttgtacacaccgcccgtcacaccatgggagttgggagcgcccgaagtcgttgaggtaacccgcaagggagccaggcgccgaaggtgagaccgataactggggtgaagtcgtaacaaggtagccgtatcggaaggtgcggctggatcacctcctttctagggagaagatgggagacggaagaacgtctttcaaactccggtcgagcgtatcctttgggatacggaaaaagaggaaaagaagaaatcaaggcttaaacgagaaggtctcggaagaggaagctgagaagaaagcggaagagcgggagatatttcgtgtctgacctgtgcagttttgaagggtcttaagagaaccttcagattgtcctttgaaaactacatcaaagaagcaagaaagcgatagaaacgaaaagaacgtaagaaagaaatctagtggagttgctgtaaaggtaacgaaacgggaagaaatcgaacgggaaactacaatttcgctttgagagaaaggcttggaggaatccaagcaagggaaaaagacgatcaagctagaaagagcacagggtggatgccttggcaccaagagccgaagaaggacgtggcaagctgcgaaaagccatgataagctgcaagcaagcgtaatagtcatggatgtccgaatggggaaacccagtggaggcaatgctccactacccgcggatgaacacatagtccgtgaggagggaacccggtgaactgaaacatctaagtagccggaggaaaggaaagaaacatcgatttcctaagtagcggcgagcgaacgggaaagagcccaaaccgcaagactacggttttgcggggttaaggacccgcgtaatctgggaagaacatagccgaatagggttggaaagcccaaccaaagggagtaagagtctcgtaggtgaaatgttttgaaggaggcggggatccagagtaccacaggacacgaggaatccggtgggaagtcggggggaccaccccccaaggctaaatactacttggtgaccgatagcgaatagtaccgtgagggaaaggtgaaaagtaccccgggaggggagtgaaagagtacctgaaaccctgtgtttacaagcggagggagcacgatctaggtgcgacctcgtactttttgtagaacggaccggcgagttacgttgtgtagcgaggttaaggcataaagtgctggagccgaagggaaaccgagtcttaatagggcgacaagttgcatgacgtagacccgaaaccaggcgacctatccatgtccaggttgaagtgggagtaaaatcccatggaggaccgaacccacgtctgttgaaaaaggcggggatgaggtgtggatagcggagaaattccaatcgagcttggagatagctggttctcctcgaaatagctttagggctagcctcataaatgattaccggaggtagagcactgaatgggctagggggccacaaagcttaccgaaccttatcaaactccgaatgccggataattgaattatgggagtcagactgcgggagataagtttcgcagtcaaaagggaaacagcccagaccgtcggctaaggtcccaaagtgcaggttaagtggaaaaggatgtggaattgcacagacaaccaggatgttggctcagaagcagccacgcatttaaagagtgcgtaatagctcactggtcgagtggttctgcgccgaagatgtaacggggctaaacctgccaccgaagccacggaacagaaatgttggtagaggagcactgtatgcgggcagaagcggtaccgaaaggagccgtggactgcatagaggagagaatgccggtatgagtagcgagagaatggtgagaatccattccgtcgaaagcctaaggtttcctgaggaaggctcgtccactcagggtaagtcggggcctaagccgaggacggtagagtcgtaggcgatggacaacaggtagagattcctgtaccaccgaagggtgtttgactgaagcagtgacacagaaggttgaccgaagcagggtgatggacagccctgtccaagcacagagtctttggcgtagtgaagtacgcgtcaagtacggatgatgtgtgatggggactgaaattagtagggaagtcgggtaaatcacgctggcgagaaaagctgctaaggaatccggaggtgcccgtaccgcaaaccgacacaggtaggcgaggagagaatcctcagacgagcgggataacccttgttaaggaactcggcaaaatgactccgtaacttcgggagaaggagtgcctcgaaagaggccgcagagaagaggcccaagcgactgtttagcaaaaacacaggtctgtgcgaagtagagatacgacgtatacgggctgacgcctgcccggtgctggaaggttaaggggaaatgttagggcaaccgaagcatagaaccgaagccccagtaaacggcggccgtaactataacggtcctaaggtagcgaaattccttgtcgggtaagttccgacccgcacgaatggcgtaacgatttgggcgctgtctcaacaagggacccggcgaaattgtagtatgtgtgaagatacacattacccgcgatcggacggaaagaccccgtagagctttactgtaacctgacattgggttcgggtaatggatgtacaggataggtgggaggcattgaaaccaggacgccagtcttggtggagccgctgttgggataccactcttccgttgcctggattctaacggctggccgtaagccggcagctggacagtgtcaggcgggcagtttgactggggcggtcgcctccgaaagagtaacggaggcgcgcaaaggttccctcagaatggttggaaatcattcgcagagtgcaaaggcagaagggagcttgactgcgagagagacatctcgagcagggaggaaactcgggcttagtgatccggcggtagagagtggaattgccgtcgctcaacggataaaagctacctcggggataacaggctgatctcccccaagagtccacatcgacggggaggtttggcacctcgatgtcggctcgtcgcatcctggggctgaagcaggtcccaagggtttggctgttcgccaattaaagcggcacgcgagctgggttcagaacgtcgcgagacagttcggtccctatccgtcgcgggcgcaggatatttgaaaggatctgtccctagtacgagaggaccgggatggacgcacctctggtgaaccggttgttccgccaggagcatagccgggtagcgaagtgcggaagggataaacgctgaaggcatctaagcgtgaaacccaccttaagatgagatatcccattccgaaaggaagtaagaccccttgaagacgacaaggtgataggccaggagtggaagtgcagtaatgcatgtagcggactggtactaataggtcgagggcttgatcaaaggaagttgtagtggaagagtagtggaaattgcagaaagctgaattgatgtagttttgaggggataaaagaggaaccctcgaaggattccggtggcgatggcgaaggggaaccacctgttcccataccgaacacagaagttaagcccttcagcgccgatggtacttggctggtgacggcccgggagagtaggacgctgccggatgttatggaacagcgctgcgcatgagcagcgctgttcctttttttgtactgcctttattgcttttttttagtcatatatggtaaagtggaaaacagacaagcatatgacaggaggatgctatgagcgcacgacattacactgtagaggcgcaccccaaaaagctgggtaccttaaagggaataggcgttacgctgcttttggccggcatggtcctgctgatctcctttcttacttacgtcttggcggcagcggcgccgcagcttgggccttggccgagctacgtggcaattgcattggtgatcctgctggggatcttcatcgggcgcaggcggatgggatattatacttatgaattgtatggcgaaaagttgacgatctaccgtacgatggggaagaaaaccacggcgctgctcaccctgccggtcagcgcgatcacaggcatcggcgcaaaagcaaaggtcaatggccgtggacaatacttttgctatgaaaaggggaatgggtttcatctttcgtatcgtgccgagcgaggggagggctggttttattttcagccagacgcccggatggtgaaaatgcttcaggacgtacgtgccgggcgtaaaacgcccgatgccgacgtagaagatgactaaaattgaggcgtacaggcaccttgcgcggtataaaacatatgctaaaggtaaaggctaatggcatatggcgaacaaggaaggtgctggatttgggtaaggttatcctggggtgctgcgcatgctgtggtaaattcggggggcatatgatgcgcctgccgggtggaaggctctgcagaagctgtgagggaaggatcattaaacagcgcgcccacgagcatgaacccgaactgatcggccagatttatcgcctgatttccccgggtatccttgacgaatggctggcccggacggtagaatgaggacatacgggcttatagcggtgcacaaacaagagcagcttaaagggccgctcttttttcttgcccattttgaggaggaatacaatggaacaggacaggcttccgctgtgtgaagcgttggaacgctatgcgggacaggccagcgtgcgccttcatatgccggggcataaggggaagggcgacggagcgctgcaggctttccctttggcgtgggatgtaaccgaggtgccgggaacaggcgatttatatgccggcgaaggccctattgcgcaggctgaggcgctggcggcacaggcgttcggggcggggcatagcttcttttccacaggaggcgcttcgctggggatattcgcgatgctggcggtaacgctgcgccagggcgatcatgttctagtgggccgggacgcacaccgcagcgcgatcgatgcgatggcactgctggggcttgaaccggtctggctgccagtgggctgcgatagcgtattcggcctgccgggcgttatagcggtagaaacgctggcgcatgccatacggctgcaccctgaggctaaggctgtttttatcacttaccccaattattatggcctttgtgccgatatcgagcagatcgcacaggtcgcccatgcggcgaatctgcgcctgttggtggacgaggcgcatggttcccactttgcctttcaccctgcgctgccgatgagcgcaggcgctgccggggcggacatgtgggtggattcggcgcataagaccctgccggccttaacgcagggggcagtcttacacacaacgcaagagattgatccggcgcaggtacggcgggccatggcgctggggggaagttccagccccaattatctgattatggcgtcgctggatatagcccggcgaacggccgcaatgcaggggaacgcgcgcctgtgcgttctgatggaaacactccaaaagtttagagcgtccatttcgcaggtagaggggttatcctgtccagaccttgtgggacgggcgggcgtcttttgccaggatcccacccggctggtcttatccgtaaagaaactggggatgaccggttatgcagcggaccaatggctgagggcgcattttggcatccagatggagatggccgaccgcgattacgtggtggcgatcacgacgatggcggatgacgcggatgatatagaaagattgctacaggctatttgcgcaatggcagacgcacatagcggacggaaggaaataaaataccaaccaagcgtggcgttaccgttgcccgagaggcagatatcccttcgggaagcggtgctcggcaagcgagaggatgttccgcttgaccaagcggaaggtcggatcgcggccgcttccttcggcgcgtatccccccgggattccggcggtatgcccgggagaagagattacccgggagatgattacggccttgcaggaacagcagcggcagggagcgagattatttggcgtagcggaacaaaaaattgcggtggtgaaaatatgaggttgccatttgatacggtgttatttgacctggacggaacgctgtccgattcaaaggagggcattatccattcgattctttacgcgctggataaactatatataaaggaagataacccccgaaaactggaggcctttgtgggcccggcattgcgcgattccttccggcgctattatgggatggaaggcgagcaactggagcaggtagtcaagctctaccgggaatactttgtccccaaggggatgtttgaaaacgaattgtaccccggcatccgggagatgctggcggagctgaaagaggccggtgtccgcatcatcctttgtacggcaaagccggagatctatgcccgccagattcttgagcattttgacatcctgcgctattttgattatgtcaagggcgcatctctggacgccagccttgggaagaagcgggacattatccgatgcgtgctggatcaggactgggtgaccggccgctgtgccatggtgggcgaccgccgggacgacctgcagggcgcgcgggataacgagatcccgggattgggcgtgcgctgggggtatgggctgccgggcgagatggaaggttgcgatccagcggcgatatttgaacgggtggaagatttaaagcgttttctattgggccagaggggatacttcatcacctttgaagggcaggatggcgccgggaagaccacgcagatgaagcgcctgcaacaggcgttggaggagcggggctactgtgtgcggatgacccgggagccgggagggtgcccgatctccgagcagatcagagagattctgctgaacatcggaaacggcgagatggacggcgtttgcgaggcttatttatatgccgccgcgcgggcgcagcatgtgcgccaggtgatcgtcccggccctgatgcggggagagatcgtactgtgcgaccggtttatcgactcctccttggcctaccagggggcgggtcgggggttgggcgtggagcgcgtggcccagatcaaccgcgaggctataggagaatggatgccggacctgacgctgtatttttcgttggacccggaaagcgggatgcagcgcaatgcgaccggcggcaagactttagaccggatggagttggctggggaagatttccgcgcccgtgtgcgtgcggggtttatggaattggccaagagccagcccagcaggatccgcgtggtggatgcagatcgctcgctggaggacgtgtggcagcaagtgctatcggccgtacaggaatatttgcatttaagccggacatagcgtataataatagtaggaaacagggaaaatggatatagaattgccaccggcaaaaaggggaggttgaactatatgaagatgattatcgccatcgtgcaggatgaggactcccagcgggttatcgcaacgctgatgaacgaaggctacagcgtaacgaaactggcgaccaccggcggttttctgcgcgtaggaaataccacgatgatgatcggcgtggacgatgagaaattggacggcgcgctggccatcattgagaacgtttgcaagagccgcaagcagattgctacttcgcccagcccggtcgcggggattaccggcatgtacgtgccctatcccatcgaggtgaccgtaggcggtgccacggttttcgtgctcaacgtagaccagtttaaaaagatgtaatgcctttgtacaagggagatcaaccgatgaagtgaaatacggccgccaaacatggcggccgtattattgtaaaagaaaggatggtgcgcgcattgctaatcgggcaggaacagttgcagtctgcattgatggggcagatttcgggcgggcgtcatgtgcatgcctatctggtatgtggggcgccgggttcgggcaagcggacgctggcggcctggtgggcgcagaccctattatgcctgcagccgggcaaacagggcccctgcggacggtgcgggtgctgcgtgcgctttgccagcggcaaccaccctgattacacgctttttacggctgataagggtaaaaatggcgtggaggatatccgtacattgctggaggacctgcccgtcaggccctatgagggacgatataagatcattgtcatcgcccaagcggataaactgacgccgcaggcccaaaacgcccttttaaaatccctggaagagccgccggaatatgcgatctttattttgacggccggcaatgtgcagatgatcttacctacggtgcgctcgcgctgcgagattttgcatatgcagcgggttcagccccggattttaaaaaccgtgctgcaggagcgggcccctcaggcggatcctttgcggatggaagcggcctgcgccatggcgggcgggtgtatcggcaaggcgctggagctggtgggtgacgatgatctgtttgcccggcgggagcgggcctaccggcagctatgtgccgtgacgcagctaaaaaagcaggatgtaccggggctgcttaccgcttttaagggtgccagggaggagaatgtgcagctgttgggtttttggctatccatgctgcgggatatgctgtgcatgaagatcggtatccaggcactggagaacgcggattacgcggcggaactggagaaaaattcccgcccctttacaaccggccagctaaaaggtatgatgaatacggtatatgaaacgcaaaaacgcatcgccggcaatgcgaacgcaggcatggctgccgagcggatgctttccgaattattggaggaaatgtcatgatgtcgaccatcgtaggggtccgttttaaacagacgggcaaaatttattttttcgatccgggggagctggaggtcgaggtaggccagccggtcatcgtagagacgcagcgcggcgtggagatgggcaaggtggcgctttctaaacgcgaggtggaggaaagccagatcgcctcgccgctgaaaaagatcgtccgcctggcaacggcggaggacgagcagcgcgtggcggataatgcgcgcaaggagaaagaagcattgccgatctgccagcaaaaggcggacaagcacgggctggatatgcgcgtggtagacgtggaatacagctttgacgccagcaagatcgtttttttctttaccgcagaaggccgggtggacttccgtgagctggtcaaagatttggccggcacttttcgtgcgcgcatcgagctgcggcagatcggcgtgcgggatgaggctaaaatgctggggggactgggcccttgcgggcggatcgtgtgctgtaacgcttatctgggcgattttcagccggtatccatcaagatggccaaagagcagaatctgtcactgaatcccaccaagatctccggcctgtgcggccggctgatctgctgcctgaaatacgagcaggatacttacgaacgcaccattaaaaagatgccgcgcgtgggatctgaaatcaatacgccagacggggcagggctggtattgggcaacaacctggtgcgcgagcgggtaaaggtgcgcatccccttaccggacgggacctttgatttaagggaatattccattgccgagatcaaccgcgggcctgtagagcggcgcgcagagggggaaaaggagcaggaaccgcgcccggaacggcccccgcggccgcaaaatcaggatgggccgcgcaggccgccgcgcgagcgggtgaaccgggagccgcgcgaggcacacccggctaaagaggctggggagaaccatgaagcgcgcgaagtacgcgaggcgcaccaggaaaaacccgccggccagcgccgaggcagccggggcggcaaccgctcccgccggggcggggcaaggccgccgcgcagggatggccccgcgcctgagaagcggcaggatcatccgcagcaggcgcgcacgcagggcgcgcgcccaaggccggtgccgcagcagccccgccagacggaaggtcagggcgaaaaagaggtgcgtcggggcggctatcgcagcggccagatttaaacaaacgagaaatgtgcaaaatggccctttcttttcggcggaataactgctataatagcgctgtatattgataaggctaatgctttagagttactctaaagggaggtgaaatgagatggcttacaaaattagcgatgcctgcatcagctgtggtgcttgtgaggcggagtgccccgtcaatgcgatttcgcagggggatagctcttacgtgatcgatgccgatacctgcatttcctgcggtcagtgcgccgaggtttgcccggtggatgctccccaggaggcctaattaccgttagaggcgaaacgcgcccccgcttttgcggtgggcgcgtttttttaatatatagcggaccgatatattttaaacctataacaaatttgtaaagttttgttaatatttaaagggaaatagaattttgcgtcgaataatagaagccccataagcgcggagatttctatatatggtgtaatcttcgttgaaaaagtatgtatattgatatagattttgacttgggagaaggtagaggatgaagaaaaacgggatgaaaaaaattattgcggtttttttggcggtggcgatcacggtatttttcgcttgcccgctgttccccagcaatcaggcgaatgccgcgcgggattacagcaccgtacgcgtactgctcacccagttggggacgccgggcagcatcgccgtacaggtcaatggcgtatattctattgctgggcgcagcgatatcaagatttcaagcggatccaccattaccgtacgcaacagcggcgggcagctgcaggtgacgaccggcgcgggcacctttaacctgggctccagcttctacatgcaggagtacgacgtgggcgccatgggtacgctgcaggcggggggcaataaatatcccggcaacatggagttcagggtcagcggttcgggcgtagccctggtaaaccatgtatatatcgagcactatctttacggcgttttgccctatgagatcggcaatagctggccgatggaggccatgaaggcgcaggcggtctgcgcgcgctcgtacacgattgctatcgtcaactccaacggcaacagttattatgacctttatgatgatgaccgctcgcagatgtacggtgggtataacgcctcttacggaaactgtattacggcggtaaacgcgacacagggcgaagtgattatgctggacggcgcggtagtcccgggatactattcctccaccaatggcggctggacggaatcggcccgggcgggcggctgtgcaaccagggattttagctgctttgtggtaaaggaggatccgtacgacaaagaagcggcgagaaatgtcaaagggctggagtataccatgacgatcccgaaagacatttctacactcagccgcagttctacggagttcagcctgatcgcgggtaagatagcgcaggctatcggctgcagcaccagcagcgttacgctcaatgagttgcagagcataaagctgatcaatccccgtaataatttttctaccaatccggaccggcagtttgagaacctgcagatgaccatacgtgccacggctaacggtacgagttataccaagaccatctccctgcatgtgcgagaggatattaaagcggcatatactgaatcaaaggtaaactttaggatgattaccctggaggatgcgggcagcgcctggaaggcgaccatctgccgcaacggccacggcgtggggatgagccagcgcggcgcccaggtgatggcgcgggattatggcaagaactacaagcagattctgtttgacctgtactttgtgggcgcttccatcggttcggtaggcattacccagccggacaagcccgattataacgtgacgatcatcggtacgggcaaggtaaacgtatccgaagattctagcctgaacatgcgctccggaccgggaaccagttacggtaaggttggttctttggctcgcggcgaaacggtagaaattatctcgacctccggcgattggtactatatccgttgcaacggcgtgttgggatatgtcagtaaggagtatattgtactggacggcgaactggatcccgatggcggcggcgagcagcccaacctgcccacgggtacggtaacggcatcatcgcttaatgtgcgtaagggccccggcacgaattacgcctctatggggactattccccagggcactgtcgtcgaggtgctggaaaagggcaccgaatggatcaagatcgtttataacggcggagttggctatgtcagcgccgagtatttggatattgcagacgcgccggagcccacgccgccggataacccggatagtgatgtggtcgcgaccggtacggtcaatgcgtctgcgttgatgctgcgggcagagcccagcacgagcgcagcaatcgttgcgcgtatgcctaatggctcaaaagtagatattttggaaaagggcggcgagtggcataaggtccgttatgaagggttagttggttatgcgtccgcgcaatatatcaaagatattgtagacgtggcccagccgacaccgacgccgacgccgacaccgacgccgacaccgacaccgacgccgacacccacgccgacgcccacaccgacgccgacaccgacaccgacgccgacaccgacgccgacgccgacacccacgccgacgccgacgcccacacccacgccgacgcccacaccgacgccgacacctgaacaggactttgtttatggttggtcgacggtgacccatcctgtttatatttattcgcgaccgggcggtggacctaccaccggcgagatggggccggataacctggtagaggtctattatcagtcggggaactattactatgtcgtgtgtggagattacaaaggctatgtaaagaccagcgaggtacgcctgactggcccgctgcccagcggcggtggtggcggtacggcggtcgccaccggtacggtggacgctaccagcttgaatatgcgctctgcccccagcacaggtgcaacggtgttgacccgtattcccaatggggcaaaggtggatattcttgaaaaaggcggctcctggcataagatcagatataatggccaggtaggttatgtcagcgccgagtatatcaagattgccggcgagggcggcggcgagacggtcgtcacaaccggcacagttaatgccagcagtttgaacctgcgctctgcccccagcaccagcgcatccagaatcgggagtattcccaggggagcaaaggtggatattcttgagaagggcggctcttggcataaggtcaagtataacggccaggtaggctacgtcagcgccgaatatatcattctggagggcgaaggcgggggcggcagcacgccttcggtaagcacgggcaaggtcaacgccacgagcctgaacctgcgctcgtcccccagtaccagcgcttccattttgacgcgtatccccaatggggcgacggtcgagatcctggaaacgaccagcggctggtacaaagtgcgctataatgggacgacgggttatgtcagtgcggattatatcaatacagatgccgtgggcaagaccatgacggtcacggcatccgctctgaacgtgcgcacgggcgcgggcaccaactatcccattgccgggcagttgccgcgggggaccaaggtcgaggtcttggataacctgggcgagtggttgcgcatccgcgcgggcagcgtaagcggctacgtcagcgcccaatatttggattgatcggtttaaaaggccggggttttccccggcctttttcttatcaacactgaaaataaaatattctgccaaaatctcatttggatgaaaggatatccacggagaatgtagaatagtttttaatgatagataaaaaacaacgaggaggggaacgggatgccggttaccattcgggatgtacgcgtcatcatgaccgcgccgccgcaggatcaaaagggagaggcttccggtaaagcgggcaaggagatctatgccgggccgaacctggtggtggtgcgcatcgacacatcggatgcggggctgtatgggctgggttgtgcgacctatacgcaaagggcagccgcggttaaaaccgctgtggaaacctatttaaaaccgcttatcctggggcgcaatgtagatgagaacgaggacatctggcatatttgcatggtcaacccttattggcgcaatgggcctgtgctcaataacgcggtctctggggtagatcaggccctctgggatattaagggaaagcgcgcgggcatgccggtctaccagctgttgggcggcaaatgccgggagggggtgctggcttaccggcacgccgacggacgcgaccccgttgaggtagaggataatgtgcggcgctttatggagcagggctttacccatgtgcgcattcaacaggggctttatggcggacgggatcaaaggctgcaccaaaccataaatccgcgagagggcgcgtattacgatccaaaacagtatatgaaaacgacggtggggttgtttgagcatattcgaagtcaactgggcgaccaggtcgaactgctgcacgatatccatgaacgactggcgccgcagtatgcggtgcaactggccaaggcactggagccctatgacctgtttttcctggaagatgcgctgccgcccgaacaggtggcctacttccgtcagatacgcgcccaaagcgccataccgctggctatgggcgaactgtttgtaaatcccacggagtggatgccgctgatttctgagcggttgatcgattatatccgctgccatatcagccagatcggcgggctgacgccggcacgtaagctagccgcggtgtgcgaggcctttggcctgcgtacggcttggcatgggccgccggatgtatcgcctatcggccatgcggccaatatccatttggacctggcaacgcacaatttcggcattcaggagtggccgcatatttccgaacagctgcgcgaggtattcccggggacgcccgaaacgcgcgatggctatatttatctgcacgaagcgcccggctggggcgtggagatcgacgaaaaggcggcggctaagtatccctgcgtgcatgagccgccccgctggacagcggcacgcctgccggacgggaccagcgtgacgccttaaattcgcggctcagcgcgaaatataccccacttgacaaattcctgtagctatttagtaaatatagttggattgtgcgggactttggtgggatgctatactgattgtacgagaaaaaaggacaaagtgggggacagggaagtgaaggactttcaccctttttcaggagaggggcagttttaccggggtgcgctgcatacgcatacgctaagatcggacggcgcgctttcggtagaggaaaccattgccgcatatgtggcggcgggttatgattttatggccattaccgatcaccagcgttattggagaaagagctcgccggatatcacgatcctaaacgggatggagatgaacggtaccatccgccatggagaggcaaaagtatggcaccatctgttgtgcattggtgctggagaggaaccctaccggcatgagcaggaattccctatgggggattttgatgacatcgccctggcgcaggcccaggtagacgcgtttactgatggcggcaagaatttgatcgccatcgcatatccggagtggacgcagatggcgctggatgattacgaagcgctggagggcttttgggcgatcgaggtattcaacaacggaatatttctggataaggagatcggctataccttggggccttgggatacgctgcttaaaagcggcaaacgcgtctatggcatcgcttcggacgacgcccatcaaagcgaccagttcgacggcggctggatgatggtctgggcggcggataactcgccgcgggcgctgacggacgcgctgcgcgaagggcgcttttatgctacgactggcccgtcgatcgagagtttctatgtgaaagatggggtactggtggtgcgcagttcgccctgccggcggatcgtctgctatacgggtgatgcggagataccgcctattgctacttataatgttagcggcgcgccggtgtatgaggcaagctatcccataaaggaaagctaccgttatatgcgggtgcaatgcgtggacgaggattatcaaatggcatttagccagccgatctggctggaggatctggcggactaaaatcgatagacgggggaagaaatacatgcgttatgttcgtttagggcgtgctggcgttaaggtttcgcgggtagcgctgggcacgggcaggctgggcagcggcgtgccggaggaaacatccatccagatcattcaccgtgcgctggagctgggcataaattttatcgatacggctgatatttatggcggcggcgccagcgagatcggggtgggcaaggcgctgcaggggcggcgggacgaggtcgtcctggggacaaagttcaagatcgataccgatgacggcccaaacgggcagggcgccagccgctaccggatcatgcgccaggtagagcgcagcttaaaacgcctgcagaccgattatatcgacctgtatcagatccaccggccggatagagagtgcgagatcgacgagacgctgcgggcgatggacgatttggttcgccagggcaaggtgcgctatatcggctgctctaattttgacgcgtggcggatcctggaggcgctgtgggtatcggaccggatgaatctggagcggtttgtgaccaaccagccccgctataatatgctggaccggcatgtagagcaggagattctgccagcgtgtaagaaatttgggctggcaacgctgtgctattcgccgctggagggcggcatgctgacgggtaaatacctgggcgggacccaggcgggctaccgcctgacgggggaggagttgcaggaccccaagcggcaggcgcagctgcataaggttgcacagtttaagactatagcggatcgcctgggggtatcgctggccaacctggccattgcctggctgatccaccgcggggaggacgtgatcccgattctgggcgcttcgcggccggggcagctggatgaaaacatccaggcgctggagctgacgctggatcaggagatcctgcagcaaatcgaggcgatcaaccccagcccgtttttcgatttcacgctgcgctaaacaatatagatagacataaagggcgccggcatctgcggcgccctttaaaaatagggggaagatgagatgaatagaatccatgcggtaccgatgaagcacgtaaacattcaagacggctttatttcccgtgcgcaacggctgatgcgcgaatcggtcatcccttatcagtggcgggcgcttaacgatagcgtgccgggggcggaaaagagctactgcatccagaacctgaagatcgcggcgggcaagataaagggcgagcgcgggggtatggtgtttcaggacagcgacctggctaaatggatcgaggcggcggcctatctcttgcagagtgagcgggatgcgcagctggaagcgcattgcgacgaaattatcgacctgatggcgcaggggcaaatggaggatggttactttaacacctactttcagctggtggagccgcaaaggcggtttaaagacctgagggactgccacgagctgtactgctgcgggcattttatcgaagcggccgtagcctattatgaggccacgggtaagcgcaagttgctggagatcatggagcgcatggtcgcccttatcgctcgtgaatttggcccgggagaggggcaaagacgagggtatcccggtcatcaggagatcgagctggcgctggtcaagctgtaccggacgacgggaaaaaaagagtatctggatctggctaagttctttatcgatgaacgtggacgggaaccctattattttgacctggaacgccaacagctacccgacgaacacttccccaacagccagtatggacgcgagtacttccaagctcatttgccggtacgccagcagcaggaggtggtagggcacagcgtgcgggccatgtatatgctgtgcggcatggcggatgtggcgctggagaccggggatgtaacgctgtaccaggcttgcaggcgtttgtgggccagcacggtgcaaaagcgtatgtacataaccggggccatcggttccactgcttatggagaggcgtttacctttgattatcatctccccaacgacaccatctatggcgagacctgtgcagccattgggctatgctttttcgcctcgcgcatgctgcaatttggcgcggaccgggaatacgccgacatattagaacgcgcgctgtataatggcgtgcttagcgggatctcattggatggggagcggttcttttacgtaaatcccctggaggtttggccgcaggagacccgggaagtgcatgattttaaagaggtcaagccacagcgccagccctggtttggctgcgcttgctgtccgcccaacctggcccgctttatctcgtcgctgggtcaatatgcctatggctatgatgcgcacaacctttatatccacctctatatcggcggtacggtggatgtgacgcttggggatgggacgctggcagctctgcgcgtagacagcaccctgccctacggcgggcagatcggtatcgaaatatgttctccgggtcattatggtttagcgttgcgcgtccccggctggtgccaggaatacacggtatgcgtcaatggagaggtggtcaaggcaacggtggaggacggatatttgtacctgcacagggattggatgaagggagataaggtgacgctcgcccttgcgctggagcctgtgcgcatgtatgcaaacgccgctgtccaccatgatgccggccttgtagcgatacagtacggccctatggtctattgtgccgaagaggccgataatggcaaggatctgcacaatctggtgctgccaagcggcgccgcgatctatgcggaatactgtgaaaattgcttgggcggcgtgatgacgcttaaaacagagggcctgcgccgggagggggcggatgatgcgctgtatacggctcagccgccgcggtttatcccccaggagatcaggctgatcccctacttcgcctgggcgaaccggggtgagggagagatgcgggtatggttgcaggaaaagtaaataatttggtggaaaaggtttaaaaacaaaacccttgccgcagtaaatgaaagcggcaagggttttttagagagaaaggttgttaatttttaaacgaaatgtaaaaaaagatgaaaaaaagtcaaaaacgcttgcattttttaaaataatgattattataataagtgtaagcgatacaacgctacacaacatcgccccccttaatttacatttatatagatgcccccctttagaaagagacttgcagatcatgcaggtcccttttgctgtaaagaccgcaggattggcatgccaacacaacagggttggcgtcttttttttatggagaaaatgctatactgcaattagtagaacaagcggctgtgcggccggcggttaagcaatcaatttgaagggggaaaaatcaatgtctggattcaagttttctgtgggcccgtggaacgtacacgatggagcggacagttatggccctgcggtacgcgcgaacatctctttagcggataagatcaaaaagtttaaagaactgggcttttccgctgtacaattccacgatgacgatgcggtacccaatattaacgagctgacgcaggagcagatcattgccgaggcgaaaaaagttaaagcgttgctggatgaaaacgggctggaagccgagtttgtggcgccccgcctgtggatggatccgcataccatcgacggcggatacacggcgaattgccctaaagaccgcgagtttgcactgtggcgctcgctgcggtccatcgatattgcaaacgccttgggctgcgacaagctggtgctgtggtttgcgcgggaaggcacggtatgcgcagagagcaagagcgcggtagatgggatccgctacacgatcgacgccatcaacgcgatgttggattacgataaaaatatcaagattctggtagagcccaagcccaatgagccggtagaccggagcttttgcggtacgatcgggcacgtgatggggctgagcgcggcaaccaaagatccctcccgcgtaggcggcctgctggagagcgcgcacgcgatcttggcggggttggatccggccaatgaaatcggctttggccttgcgatgggcaagctgtggagtgtccacttgaacgatcagaacgggatcaagttcgatcaggataagaccttcggcgtggagaacctgcgtcaggcctttaaccagatccgtattctgaaagagaataactacggcagtaatggcgaatatgtgggcctggacgtgaaagcgatgcgcaccacgaaggatgccgacagctacaagcacctggagaacagcctgaagatcgccaagatgctggaagagaaggcggagaaatttgactatgcgctgcgtgacgagtttgtaaagaaccgggactatgagggcctggagatgtacgtgatggagctgttgatgcgcggctagctctagcatagatatggactaaggagacaagggctataactttttattaagagttatagcctttcgtttctccaggaagtatactatatatagtagaaactccgctaaaaatcacgaaataagggggaatcgttgtggcgaagggcattggcgtggccggcaacctggtagaggatatcatctatcccatcccgcgttatccgcaaagtggggagcttgccacgattggagagccgatcatccgctccaccggcggcgcggtatgcaacgtgattatggacctggcaaagttggatgctagcctcgcgctgaaggctatcggcgttgtgggcgaggatgagggcggaaagctgattatggatcgcctggccgcccatcctaacatcgattgttcacagatcgcctttgaagggcgcacggctttcaccgcggtgatgagcgatgagcagaccaaacagcgcaccttttttacctatcccggcgcgaacgatcttttttccttaagacatatgaactgggatcagctggacatcagcctgctgcatgtgggatatatcctgctgctgggggcgttggatcagcccgacccggactacggaactaagatggcacagctgctttgccaggcacgccagcaggggattgaaacctccatcgatgtggtcagcggtgcgggcgggcgcttccaggcgctggtgccgccggcgctgaaatacacggactattgcatcatcaatgagcttgaagctgaacagaccacggggatcccgctgcgcgcaggcgatgcgttaatcgctgcgaatatgccggaggcgctgcgcatgatacaggatatgggcgttgctaaatgggtcgtggtccacgccaccgaaggggcctttgggctggattgcacaagcggggaattggtgcagatggggagcctggtgcttccgaagggatatatcaagggaacggtaggcgctggggacgctttttgcgcgggtgtgctttatggcgcttaccagggtaagccgttaaaagaggcgatccgttatggcattgccagcgcagcctgttcgttgtctgcagaaggcagcacggaggggatgcggcccttggcgcaggcgctgtccctttacgaggaatatcccttacgctgattttgtagcaaaggaaaagaacaagggctccgatggctgttctgctggcctatcggagccttttgtggtagaatggaatgcgtacggcgtcggcaccgaaatggggctgacgtttaccggggcggcaagaacggccgatttaggccaagttcggtagagaatagaagtagaggctacaaccagaaagagaagctatttattacgtaaatttaaaaaattattaaaattgcgtaataaatagcctgaaatccggaggaaaacagaggaaatcgaagaaaatattaatagttttattacggaaacgtaataaaacccggaatttaagcccaaatcgggtttaaacggagttaaaagatttgcggacaaggccttttatccgctataataacgtcatgatcaatcatgctacagtaaattcggggaaagcaggtgtgaaaagttgaattgtaagaagataacgagtctgctgcttgcgggcgcatgcgctatcagcttattagggttctcgcccgctccggcgcaggcggctggtaccgtgtaccgcttgggcagcgagggggaggccgttaaaaagatccagcaacagctgattaagaagggctactatttcgcggatgtgacgggctattatggtgagatcaccacttctgccctgtctcagttccagaaatataacgacctggagattgatggtgtggctggcgagaagaccttgaagcttctctttggctccagttatagtgatttcatcaacagcgtgggcggcgaaggcagcgcggcgagcagtgatgatttgctgctgctgggcgaccggggcgatagcgtaagcggcgtccagtcccgtttgaaagagctgggttattatacccactccagtgtaacgggttactttggcccgattaccacggaagcggtcaagcagttccagagcgccaacggcttggtagccgatggtatcgtaggtcccaagacggaggacaagctgaacagctccaaggctgtttccaagcagaatgcttctaagacgcctgcggccagctcgaacagcaatgccagcagttccagctccaacacggataagtcttcttccagctcgagcagcaagaacgactccagcgcgaagaaggatgaaacgccgtccaacacggcttccggcagcagctcttccggtagctcttcggcgcagaacatcatcgccaccgcgaagaagttcttgggacggccttatgtttacggcgcaaatggtccggatacctttgactgcacgggcttcacgtgctacgtgttccgtcagtatggcatctctctgccgcgtaccgcgcagagccagggctattctgattacggcacgaagatctccagcgcctctgcgttgcagcccggcgacctggtattcttcaacacggttgacgataacgacctgagcgatcacgccggtatttacatcggcggcggccagttcatccattgcagctctggtaaggcccgctgcgtggtgatcagcagcctgtcctctggatattatcagcagcgctttagctggggccggcgcgttctgtaaaacctaatcgatcaactttgatcgcccaagggtatagattcccttgggcgattttgttatactgacctatagtaggcgtgcagggagcggggtggcgacatggcagatgaagattggcaactgttgccgggcgagcggctggacgacttgcaggccgatgggctaaagatcatccagcggccgggtcgcttctgctttggtaccgattcggtattgctggcacattttgcgcggcgtatgcgggcaaagcgtgttttggatctttgcgcaggcaatggcgcggttgggctactgctgatggcgcactgccctggggtagagatgacctttctggaattacagcaggagaattgtgatatgctggcgcgcacgttagcgggcaatggtttgaaggcgcatatcgtaaaggcggatgccagagaattgccggcatataaagcgctgcgcaattacgaattgatcgtgtgcaacccgccttattggccggatgacgggcgcgcgatgccggaagaccccgcgcagcggctggcccggtttgagagcgggatgaccttggaagcgtgtatagcgctggcggctgcatgtctatgcccgcggggcgcgctggatctggtgctgccggcacagcgcgcggcagaagctatcattgccatgggaaaggcgggcctgtcccctaagcgcgtgcgcattgtgcaggccagggtgggaagggatcccagccttgtattattggaaggcacccgcggcggcggtaaagacgccgtttggcaagctccgctcatcttatatgatgcgcagggaaattatacgcctgaaatggttaaaatatatggatcggagtgagagaatgggcgagcgtaatatggtttcaccggggtggctttatctgtgcgcgacccctattggcaaccttgaggacatcacgctgcgggttttgcatacgctggagcaggtcgatttcatcgcctgtgaggatacgcggcatacgctcaaactgctcaaccattacgaaattaagaaaccgctcctatcctgccatgagcataacgagcgcgccagcgctgaaaagatcatcgcgcggttgcaggcgggagagagtgcagcgatggtatccgatgcgggtatgccgggcgtatccgaccccggagcggtactggtgcagctgtgtattgagcatggcgtgccgtttaccgtgctgccgggcgcctgcgcggcgctaaccgcgttggtcctctcaggtatggataataccgcttttgtatttgagggatttctaccacgagaggggcgggccaggcgcgaggccatggagcacttgctcgcgcagacgcgcaccagtattttttatgagagcccacagcggctgaaccggacgctggcggcgctggccaatgctgacggtgagcgggggattgccgtgctgcgggaactgacaaaaatacatgagtctgtcttccggggaacggttgcgcaggccgcggcgtattttgaggcgaatccgcccaaaggggaatttgttctcgtgttgcagggcgctccgcagcggccgccgctatcggaactggatgcattgcctgtggaagaagcactgaaaattttactagatcgcgggatggagaaaaaggaagcgatcaagcaattggcacgtgcacgcaaggtgaaaaaggatgatatttataagatcgcattagaattaacagaaagttaatagaattgacaacttcccttaacgtttgatacaattttcgcttatttgtgccttgacggaacttgatcctttttgctattatttatgaaagatgaatggttcctgcataaaagcaggcatatctttctacttttcgtcaaagattttaaaattaaatgtttggcaatgaatgacgctgagggcggtcgttccctctttcctcatggcttatgagttgtgactacacggtatggaggacagcgttgcgctgtggtacccttgaaaaaagggtgtgcatggcgttttcggcgaaaggagtgctttatggcggaaaatgattttagcgggaaatccctgcaagagctgcgcgcgttagcgcaacaagctggcatccgctcgattacgcgctatcgcaaacaagaattgattgataaattgatggaagtacaatctgccgcggacaatccccctatccaggggcagggggatcagccggccgtccctccggcaaagcgccggggacggcccagaaagaccgagagcccggaggcggctgcacctgcccagacgatagagccagtggaggctgcgcctgtcgagcgggaaggggtacaggaggaggttgtgcctgccggtgagcaggaaacggtgcaattagcggatactccggtggagcggtatgcgcctagcgagacttacaggtctgcgcagcgccgccccgcaccacgtgaacggagcttggacggcgggctgcaacagcgcacctatatgcgccccaatgcacagcgaggctatgtgcgcagcgatatgcagggccgcatgcgtccgcaaaacagcaatacgcggtatgccccgcgctataatcagcagcaaaatgacgcttggcagagcaatgccggagagggccagcgtgccccttcgcagcgctatacgccccggccgccggtgcagaaccagtatgcggaagaggccaaccagcagccccagggcggcgaagaggccaaccgcctgcagcgcccggtggaaaactggatccgcaccggacagtgcggggatgccaaaggcgtgctggagattttgccggatgggtacggcttcctgcggtcggacaactatctacccggcagccgggatgtgtatatttccatggcgcaaattcgtaaatttgcgcttaaaacaggagatttgatctgtggaaaagcccgtacggtaaaagagggcgagcggtatatggcgctgctgtatatcgaatcagtcaacggcctggatccggagagcattcgcgggcggcggcctttcgagcagctgacgccgatctacccggaggagcggctgaccctggagcagaaaaacagcaaggatatggccatgcgtctggtggacctgctcgcgcccgtgggcaagggccagcgcggcctgatcgtgtccccgcccaaggcgggcaaaaccacgctgcttaaaaaaatcgccaatggcattagcgataatcacccggatgcgcatttgatgatgttgttgatcgatgagcggccggaggaggtcacggatatgcagcgctccacccggggcgaagtgatctattccacctttgaccagatgccagaacaccacacgcgggtggtggaaatggttttagaacacgcgcagcgccgcgtagagcagggacaggacgtggtgatcctgctggactccatcacgcgcctggcgcgggcgtataacttgaccatacagcctacagggcgctcactctccggcggtttggacccgggcgcactctaccggcccaaacgattctttggtgctgcgcgcaatatcgaaaacggaggcagcctgacgatattggccactgcgctggtggatacgggcagccgtatggacgatatcatctacgaggagttcaagggcacgggcaacatggaactgcacctggatcgttcgctttcggagcggcgcattttcccggccatcgacttgaaccgttcgggcacccggcgggaagagcttttgcttacgcctaaggagctggaaggcgtgctgcacatccgcaagctgctttcgggctgcaacaacgcctcggccgccgagcagttgttgaccatgatggaaaagacacgtaataatgaggaatttttggtcaaacttaatggctgggtgggcatgatggaaaaggaaggctatgcgatcccgaaataaataaaaaaactgcttgcattttgaccggcatatggtataatatcaaagcagccatttaggacgtgctgttacacgtcattacctgtggcgcggaagaggtgagttctgatgaaggaaggcattcatccgaagtttgggaaggcgattgttcgctgccagtgcggcgagaccttcgagaccggttcggtcgaaaaggaactgaaagttgaaatttgctcgaagtgccatccgttctacaccggcaaacagaagctggtggataccggcggccgtgtagatcgcttcaaaaagcgctacgggctgtaagatgcacattggacggaaatacaggctgggatttttcccggcctgttttttgtcgtatccccaaaggtagatagattttatgcgcggcctcttttgtatcctcccctgtttgtgctatgataaaaagatgaagattacagacggtgacaaacccggggtcagggtttgaaaggggagcaaatgcaaaaggtaagttcaattggcgggcaggccgtattggagggcgtaatgatgcgctcgccccagcttttggccatagccgtacgcaaggaggatggccgcatcgccctacatgtttcggagacgaagacgcgtaagggttgggtgatgaagtgccccatcgtaaggggcgtcatcaactttatcgatatgctgcgcatgggtgtgtttaccttcaccaaggcgaccagtatgttgggcctggaagaggaggaaccggggcgtttctcccagtggatatccgggaagacgggcaaatcggccgacagcatcatgatggggacggccatggtcctagggctggcactggccatcggcctgttttttatcctgccctcgctggccacacaatggatggcgggatgggtggaccccatggtgcgcagcctgtgcacgggtgcggtcaggctggtcattttttttctctacctgtggctgacggctcggatgaaggagatccagcgggtttttcagtaccatggggcagaacacatgacgatttttacctatgaaaacgagctgccgctgactgtggagaacgcccgcaagcaaagccggctgcatccccggtgcggcaccagctttttgctgatcgtgatgatgatctccattctggtattctcggtcatccgctcggacgagctatggatacaggtggtgggccgggtggcgctgctgccggtggtaacgggcatttcttatgaagtgttaaagtttttggccaagcatgaaaaccccgtatgcagggcgctgcgctggccggggatgcaactgcagcgactgaccacccgcgtgccggacgatagcatgctggaggtggccatcgccgcgtttaaagcggccgatgggcaagcggaaacaacggaggattacgacgcatttatggacgcgcaatgcgctgcggaggcggctgatccgcaacctgatatgcgaatggaactggaacaaaccggaggtgtatagatgagtacccgcagacaggcgattttagaggcggtagcgcttttgcgcgcgcagaacgtaccctcgccgctgtacgatgcgcgggagctgctggcctttgcgctgcgcacggatgtgatgaccatgcgcatgcactcgggcgaggtgctgacccccgagcagcagcaggtatttgacagctatatcgagcagcgctgcaagcgcatgccgctgcagtatattaccgggcgccaggcctttatggggctggatatctcggtgcgcccgggggtgctgatcccccggcaggataccgaatcggtatgtgaatacgcgatgggctgcgcggacaagctggagatagaacagccccatatactggatctatgctgcggctcgggctgcatcggcgtggtcatggcggtacagctgcctaaggcacgggtgacctgcgcggatatcgacccatcctgcatcgaaatggccaaggccaatgcgctcaagtgcggagtatccgacctgatgcgctttgcccagggcgacctttgggaggcggtgcagggggagacctttgacctgatcgtgtccaacccgccctatattccgcgctcgcagatcccgcacctgcaaaaagaagtgcgggactttgaaccggagctggcgctcaacggcggctcggacgggttcgatttttatcaccgcatcatcgaacaggccgcccaacacctggcgcccggcgggtatctcgtgctggaggcgggggatgggcaggccgacctgctttgccggatgctgcgccaggccggctttcagaacgtggagaacttccccgacctgtcgggaaacctgcgcgggtgcgcgggacaatggaaaaatacggccgaataagcggccctgatacagaggtggcaagttgttagacaagctgattccaattgaagagcggtaccagtttttaagcgaggagacggccaaacccgaagtgatcgccaaccaggaagaatggcggggcatgatgcgggagatgagcgagctggagcccgtggtggaaaagacaaaggagtaccgggcggtgctgaccagcctgcaggaggcgcgggagatgctggaggccgaggatgacccggagctgcgggagatggtgctctcagagatcgaggagctggagccccaggtggcccccatggaggaagagctgcagcgcatgctgctgccccgggacccgcaggatgacaagagcgtggtgttggagatccgcgcgggcacgggcggcgaagaggccgcgctgttcggcatggatttgatgcggatgtacatccgctatgcggagcggcataactggaaatacgaggtttcggccttgaatgaaaccgaactgggcggcgtaaaggaagcggtggtgctgatcaatgctaagggcgcgttctcccgcctgaagtacgaaagcggcgtacaccgggtgcagcgcatcccttccactgaatccggcgggcgcatccatacctcggcggctacggtagccgtgctgccggaggcagaggatgtggatgtggagatcaaccaagcggatttgaagatcgacacctatcgttccggcggcgcgggcggtcagcatgtaaacaagaccgaatccgccgtgcgcattacccatatgcccacggggatcgtggtggcctgccagaatgagcgcagccagatacaaaaccgcgaaacggccatgcgcatgctgcgggcgaagctgctagattattaccgtcagcagaaggactccgcctacagtgaaaaccgccgcagccagattggctcgggcgaccggagcgaacgcatccgcacgtacaatttcccccaggggcgcattaccgaccaccggatcaatctgacggtttaccaattggaagcctttttggatggggatctggacgagatgctggacgcgctggcgctggcggatcagcaggcgcagttggaggcgctcaacagcgcccaggactaaacgcgtataaccccgcgggcccggccatataccttccttaagaggaagggggcatggcatggaaacggagggcttttcggcgctgttgggcgcttttagcggggtattcggcacgggattaggcgggcttttggctttctcgatccgccgcatgccgggcaaccggctggtggccgttaccttaagcggagcggctgggctgatgctggcggtttcctgctttgacctgctgcccggtgccatggcgctgggcggactatggacaggagtatcaggcattttgctgggtgcggtttgtatggctggcaccgactcgctcctttaccacaggcagaccatggcaaagctgcatagcggcatcggccggacggggcttttgatggcgctgggcattgcggcgcataacctgcctgaggggctggccattggctctgggatgcaggtggagatagaatacggctttgcgttggcgatgctgatcgctttgcacgatctgcccgaggggctgattttgggcattccgctgcggatggcgcggatgggcaagtggcgcgtgatgggcatggcgctgctggcgggcgcgcctacggcggtgggcgcctttatcggcgacgcgttgggcggtatttcgccctattttgtggcactgtgcctgagctttgccggcggggcgatggtctatatcatctgtacggcgctgctggcagagggcatagaggccgcgcgcgggccgctaaacggattggcgctggccggtgggctggctgtggggctggcagtagcggtattgttatagtgccttaaaggaggcttttagggtggaaaattgggcgcgggaagcggaagtgcaaacgcgcatactggcgcatgacgcacccggcgcgatgctggaagctgcagaattgatccgaaagggggagctagtggctttccccaccgaaacggtgtatgggctgggggcaaacgccctgtgcggccaggcggtgcaaaagatctttgcggccaagggacggccgggggataatccgctgatcgcacatgtgtgcgatattaagggggtagagccgttggtggcgcgtataccgccgctggctaggcgggcaatggaggccttttggcccggcccgctgaccatcgtattccccaaaagcggcgcggtgcccgatgcggtgacggcgggcttggatacggtagcggtgcgcttccccagccatccggtagcgcgtgcgttgattgagcgggcggcctgccctatcgccgcgccatcggccaaccggagcggacgccccagcccgaccaacgcacaagacgtttatgcggatatgcagggacggattcccctgatcctggatggcggtgcgtgcggggtgggcgtagaatccacagtgctggatgtaagcgacgggccgctgatcctgcggccgggcggcgtaacgcaggggatgctggagcaggcgctgggcatgccggtccgggtgcatcaggcggcgttaaagcccctggaaggggaggcgcgttccccggggatgaagtataagcattatgcgcccaaggcccaggtggtgctggtagaaggggagcccgaggccatggcgcaccgcgctgcacagctgtatgacgaggcattggctaaggggaggcgcccctgcattttggggacggaggaactcaaggatatctacggggagcgggcgttttacccgctgggcaagcgtgcccagcccgagagcatcgcccacaacctgtttgccgccctgcgggagatggaccggcgcggctatgatgcggtattttgtgaaacggtagaggcccagggcgtcggtctggccatcatgaaccggctggtgcgcgctgcgggctataagatcgtgaaaggatagggatagttcgacccatggaaattttgtttatctgtactggcaacacctgccgaagccctatggctgcggccctgctgggggcgcagctgctgcccggtgtaacggcggcctccgccgggatatcggcctttccgggtgaggaggccaacccttatgcggtggaggcgatgaaacggcggggtattgacctaagcgagcatgaggccaagcaggtgacccgggagatgatcgaacgggcgcatctggtgatctgtatggagcagggccaggccgaggtgctgcgggatgcctttgaggaggcggatctggatcgcaagatctattccttccgtgagttttttggcggaagcaccaaggacattcccgacccgtatggcggggatgagcaggtttatgaaaattgtgccgtattattggaaaaatacattaaaaaattcgtcaaaaagattttgatgcaggaataattgcggttgcgccccctttttaaatacgttataatatttgaggagtgctaaagccattttagcacgcctaacgaatataagggggtgaaagcatgattgctttaggaagcgaccatgcaggatttccactcaaggaagttgtacgaaaatatttagaggagcagcagattccctttaaggactacggctgttttaataccgattctgtggattaccctgaccaagccttgaaggtggcgcaagcgattgtagccggcgaggctgatcggggtattttgatttgcggcaccggcattgggatcagcatctcggccaacaaggtgccgggcatccgcgcggcgctgtgcggggatgtatattcggccaagtacacgaggctgcacaacgacgccaatattctggccatgggcgatcgggtgctgggcgaggggttggcgctggagatcgtaaagacctttttggaaacggagtttgagggcggacgccaccagcgccgtgtagataagatcgcacagattgaaaaaatgtattctaaataggtgggacaagcttgaaggaggcagacggtaaagtgggcagactctatgtatttgaccacccgctcatccagcataagctgacgatgattcgggataaagataccacgtccaaagacttccgtgagttggtagacgaggtggctatgctgatggcttacgaggtcacccgggatatgcagttgcgggaggtggagatcgaaacgccgatcaccaccactaagagcaaggtactggccgggaggatgatcggcgtggtgccgatcatgcgcgcgggactgggcatggtcaacggctttttgcggctggtgccggcggccaaggtaggtcatatcggcttgtaccgagacccggagacgctaaagcctgtggaatactattgcaaattgccggtggacgcccaggagcgcgacctgatcgtggtcgacccgatgctggctacgggcgggtctgccagcgcggctatcgaatttatcaagcagcgcggctgcaagagcatcaagctggtcaatctgatcgccgcgcccgaggggattgagcgggtgcgcgccgaccatccggacgtggatattttcgtggcggcggtggatgaaaaactcaacgaccatagctatatcgtgcccggactgggggacgcgggggatcgtctgttcggaacgaaataaaaaaagaacgggcaaaaagggggagaatttggattggctgaacaactggtacaatccatcttggaggcggaaagccaggctgagcagatgcggcggggggccgctgcgcagggccgggatgcgttgatcgaggcggaggcgcagatgaaggccgcctacagtgaaaagctcgctgcctttacggcgcaggtccaggatattgccgcggctgcgcaaaaagagacggacgccgcctgccgccaggctggcatacaggccaaggagcagggagaggtgctgcgccagcgtgcggagcagaacatggcgaaagccatcgcgttcatcgtagaaaggatgagttagatggcgatcgtaccgatgaaaaaactgaccctgatcgccatgaaggacgaccagcaggccatggtgcgattgatgcaggaattgggctgcgtcgaggtagtcgtaggcgataaggaagaactgcccgggacccgggagatggcggggagcgccgggcaggaagaggacctggctgcggttcgtgccgcgatccggttcctgacgccctatgcacccaagaaaaaaggatttttgccggaccgcgatctgatggccatgggcgagtttgaagccatggatgatgcgcaggcgcgggagggcgcgcgagaagcccgcgaaatgcaggcggagctgggggatattgccgctacacggctgcgtatccgggcgacgatagcctcccttgaaccctgggaggggctgaagatcccctttgaacagattcgcgatacccattatgcggcggtgcagatcggcacgctgccgccggcgaacctgccggagctgcaggaaaagctggcgttgcagcagtgggcggcacagctggatacggtatccgaaatgcgcgaaggggtatgccttttggcagcggcgcataaagagcacgctgaagcatttttcgatctgctcaaggcgtcgggctttgtgcgtgccagcttcccggagctgacggggaccgccggagaggcattgcaacggctgcgcaaagagctggatgagctggccgcccgccaggcggagatcgagcgcgaggccggcaacctggcggcacagcttaagccgctgaagctgctggaagataaactggccgcccataacgaccgggcacaggcggcgggccgctttttgcagaccgaacagaccttcatcgcccaaggatgggtacccgtaccgcaacaagaacttttacgcggtgaactgcaaaagatatccgagacctttgaactgcagctgcgggatccgcaggagggcgaggtcttccccacggctacgcataacggcaaggtcgtggaaccctttgaattgattacaaatctttattccacgcccgattgccgggagttggaccccaatgcgctgatggcgccgttctactttgcctttttcggcatgatggtttccgacgcgggttacggcatcgtgatggcgatcgtcgccacgctggccaacaaattcatgcggccgcggggcatggcggggcagctggcccggctgatgatcgccggcggcatctccacctttatgtggggggcgctgtttggcggctggttcggcattgagttgccgccgctgctgttcgtcccgatgcaggagccgatcatgatgctggcgctgtgctttggcctgggcgcgatccatattatgacgggcatgggcgtcaaggcctacaccctgatcaaagagggcaaggtatgggatgcgatttttgaccaggtgacctggatcgtactgatcatcggcctgccgatgctggcgctgccggccacgcagatggtggggatggtgctgtccatcgcggcggtggtcaccctgatcctgacccaggggcgggccaaaaagaacatctttgccaagctgatcggcggtatcggcagcctctacaatatcacaagcgtactaagcgatatcctatcttattcgcgcctgtttgcgctgggcctggccacgggcgtaatcggtatggtcatcaacaccattgcgaccatgctggggggcaactttatcggcagtatctttatggttgccgtcttgatcggcggccacgccttcaacctgctgatcaatgtgctgggcgcgttcgtgcacgccagccggttgcagtatattgaattcttcggcaaattctacactggtggcggccacgcctttgacccgttgcgttaccgggcaaagaacgtggacctgacgcgccaaaaacaggcagctaaatagacgatcattattttaaaaaatataagggcatcgtaaatttaaggaggaatgggattatggaactaggtcaaatcttggcgctgtcgggcgcggcggtagcggtaattctcgcgggtattggttcggcaatcggggtaggtctggcgggccaggcagccgcgggcgttgtcagtgaagatccggacaagttcagccaggcgctgttgttgcaggcgctgccgggcacgcagggtatttatggcctgctgatcggctttatcgtcatgatgaacatcggcgtattgggcggcttaaagccggtgaccgagacccagggatggctgatcttcgcggcgtgcctgcctatcggcatcgtgggcttgatctcggccatcgcgcagggcaaggcggctgttgcgggcattggcttgatcggcaagcgcccgggcgagctgggcaaggccatcacctttgcggtactggttgagacgtacgccgtgttggcgctgctggcttccttcctgatggtgaacggcatcgcaatcggttaaagaggactaaatgaagggtgggcatgctttccatgacgggagccgaaaaaataattgaaaagattctagccgatgcccggacggatgtgcaaaacaccgaaagggaattggaggagcgccgtgccgcgctagaggcccagtatgaggcccgcgcgcagcaggatggggaaaagatcctggaagatgcccggcaggatgcccaggaggggcggcgacgtcaactttccatggcgcagctggaagggcgcaaggccattttgaccgttaagcaggagttgatcgcccaagcttgggaaggggccttacaggcgctttgtgcgctgccggtagaggaataccgcgcgctgatcggcaaaatgctgctggaaaccgctacggagggggagcacgagctgcttatcgcccaaacggatgcagagcggctgggccaggtgtttttagacgaatacgccgggccgctggctgccaagggcgctaccgttcgcgccggcgggtttgccccgatccggggtgggtttatcctgcgcaccggagggatggagatcaactgtgcgctggagacgctgatgcgcatggcgcgggggaaatatgacgcccaggtggcggaaatcctgttttagggcagtgaggaggagttgcatatgccacagccaagctatgcttatgctgtagcccgcctgcgcgtattggaagcgcggctgctgccccgggaaaaactgatgcagatcgtcgacgcgcaggacgcggcggaagcgctgcggattctcgttgaagggggcatcggcggcgcgctgcaggttgcttctgcgcacgagtatgaggcgctgttgcgggaagatttgctggaaacgcgggaattgatccgcgccatcacgccggagccgcaaaccacggcgcggttcttttaccagtacgattgccagaacttaaagatcctctttaaactgcgcgcgctgggcagggatggcggcgaagaaatgctttccccgctgggcgagatcgcgccggaggagctggcgcgcaaggtgcgggaaaaggactataaggagctgcccgggcctattgcgcagggctgcgcggtaagcgaaaatatgctgctggaagcggcagtggatccgcagcgcctgagcgcgattttggacagggcctacttcgccacggcgctggaggggcttaaaaaaggctttttgcgggattattttaccgcgtggatcgacctgatcaacatcagcacggtgttgcgactgcggcgcgccgggggcgaccgggccgcgctggagcagttgaccatcccgggcggcggggagagcgagcaaacgcttgcccgtgcgctggaggaatccgacgaggggttgatccagctatggcagttccgcccctttgggccggtagtggtaggcggtattgaggctttgcagcagaccggaacgctggcgggctatgaacgggcgatggacgattacctgatggcgctggcgcgagagggaaagggcgagctgatgagcatccgcccgatcctgggctactggttggccaaggaaagccagaaccggcagttgcgccagatcatgatcggcaaattgaacggtatcgcgccggacgcgatacgcgaaaggctgcgtgagacctatggttaatttaggtgtagtaggcgagcgggactcagtaatgggctttaaggccctggggctgtatgtggtggaggcatcttcccctacccaggccgcccgtgcagtggataaaatggcccgggagggctttgcggtcatcttcattacggaaactatggcaacgcaaatgggcgaaaccatcgataaatataaagccgaggcgtatccggcgatcatccccatccccgggaaccaggggacgacggggttgggcatgcagttgctaaagagcaacgtggaaaaggccgtgggggcggatattcttttcgggaaggaagggtaaggtaaatggaggggaaaatcgtcaaggtttccgggccgctgatcgtggcttcgggcatgggcgaggccaaaatgtatgacgttgtgcgcgtaagcgagcagcgcttgatcggcgagatcatagaaatgcgcggagagatggcctccattcaggtatatgaggaaacggcgggcctggggcccggcgaaccggtagaaagcacgggctttccgctctcggtagagctggggccggggttgatcgaatcgatcttcgatgggatccagcgcccgctcaaggtcatccgcgagatggtgggggaccggatcagccgcggcatcgaggtcaacgccctggaccacgaaaaactatgggcctttaaaccggtcatcaaggtgggcgaccgggtgagcgggggcgatatcttcggcaccgtgcaggagacgccggtggtggagcagcgcatcatggtgccctatgatgtggaaggcaccgtggaatggatctttagcggcgaggccaccattatggacccggtgctgaaggtgaaaaaagacaatggggagatcgtggagctgcccatgatgcagcgctggccggtacggcgcgggcggccttatgtgagcaagatctctacctccgaacccatggtgaccgggcagcgcgtgatcgataccttcttcccggtggtcaaggggggcgtggccgcagtacccggcccctttggcagcggcaagacggtggtacagcaccagctggccaagtgggcggatgcggacatcatcgtgtacgtaggctgcggagagcgcggcaacgagatgacggacgtgctgatggagttcccggagctgaaggatccgcgcaccggcgagccgctgatgaagcgcacggtgctgatcgccaatacctcggatatgccggtggcggcccgcgaggcctccatctataccgggatcaccattgcggagtacttccgcgatatgggctataaagtcgccatcatggcggattccacctcgcgctgggcggaggcgctgcgcgagatgagcggacgcttagaggaaatgccgggcgaggaaggttacccggcttacctgtccagccgtttggcggagttttacgagcgggccggccaggtgcagtgcctgggcggcgacgggcgcaccggcgcggttacggccatcggcgcggtatcccctccgggcggcgacatttcagagccggtatcccaggctacgctgcgcatcgtcaaggtgttctggggcttaagctccagcctggcgtataagcgccacttcccggctatcgactggttgcagagctactcgctgtataccgaccggatcgagggttggtataacgccaacgtcagcccggaatgggacagcctgcgacaaaaggccatgggcatattgcaggatgaggcctcgctggacgagatcgtgcggctggtaggcgtggacgcgctgggctttagggaccggctgacgctggaggcggcgcgctccatccgtgaggattacctgcaccagaacgcattccatgaggtagacacctattccagcctgcaaaagcagtttggcatgctcaagatgatcctggcctggtacgagcagggcctggaagccctggacgagggcgccagcttgcaggcgctgatcgctctgccggtgcgcgagcggatcagccggcttaaatacgtgccggaggaggagctcggctcctttgccgaggtggaacggcagctgcaaagcgagatcgcggcgctgctctccgaggaaggggtgtaaagaatgctgaaagaatatcgtacgatccgcgaggtcgtagggccgctgatgttggtggatcaggtagaaggcgttaaatacgacgaattggtggagatcgagcaggccaacggcgagatccgcgctgggcgcgtgctggagatcgacggcgataaggcgctggtacagctgtttgaaagctctcaggggcttaaaatatccgatagccgggcgcgctttttaggccggggcatcgaacttgcggtctctgaggatatgctggggcgtgtgtttgacggcatgggccggcccatcgataacgggccggagatcattccggatgcgcgcatggatatcaacggtcaggcgctaaaccccgcggcccgggcctatccggatgagttcatccagacgggcatttcggccatcgatgggctgaataccctggtgcgcgggcaaaaactgccggtgttctccggttcaggtctgccgcacgcacagctggcggcgcagatcgcccgccaggccaaggtgctggggcaaaacgagcgcttcgcggtggtgtttggcgccatcggcatcacctttgaggaggcggacttctttattcaggatttccgccgcaccggcgccatcgaccggacggtgctgtttatgaacctggccaatgacccggcggtcgagcgtatcgccaccccgcgcatggcgctgacggcggcggaatatctggcctatgagaaggatatgcacgtattggtcatcctgaccgatatcaccaactatgctgaggccctgcgtgaggtgtccgccgcgcgcaaggaggtgccgggccgccggggcaaccccggctacctgtatacggatcttgcctccatgtatgagcgcgcgggccgcgtgcaggataagaagggatcgatcacccagatccccatcctgaccatgccggaggacgataagacccaccccatcccggatctgacgggttacatcactgaggggcagatcatcctctcccgggagttgtaccgccggggcatccagccgccagtagacgtactgccctcgctgagccggttaaaggataagggcatcggtcggggtaagacccgggaggatcatgccgactccatgaaccagctgtttgccgcttacgcccgcgggaaggattgcaaagagctttccgccattttgggcgattcggcgctgacggatgtggataagctgtacgctaaatttgcggacgcctttgaggcggaatacgtcaaccagggatatgagaccaaccgcaccatagaggagacgctgaccatcggctggaagctgctcggcatcctgccgcgcaaccagctgggccgtatccgcgacgaatacctggataagtacctgcccaaagcggaaggggagtaagctatggcgcaaacccgtgtaaaccccacgcggatggagctgacccggctcaaacgcagcctggccaccgccgtgcgggggcataaactgctaaaagataagcgcgacgagatgatgcgccagttcatcgggctgatccgcaagaataaggagctgcgcgaggacgtggagcgcgagctgcaaagcgcgctgaaaggtttcgtcatcgccagggggaccatgccggcggagacactggaggaggcgatcctctacccggcgcggcagatcaccgtagaggcgggcttgcaaaacgtgatgagcgttgaggtgcctaagctacaactgcaggagctgggggagaaaagcggcgcgctgccttacggctttgcctttacctcggccgagctggacggagctatcgccaccatggcagagatactgcctaagatgctgcaactggcggagatcgaaaaatcttgtaaccgcctggcggacgaaattgaaaagacccggcggcgggtcaacgccctggaatatgtgatgattccgcagatggaggaaaacatccgttacatcactatgaaactggatgaaaacgagcggggtagtttgacccggctgatgaaagtcaaatccatgatcgcccagcggcaagaggcatcggtataagaatttatgcaaagggctgcgcagtataaactgcgcagcttttttatttttttaggtggttgcatgcttatagcatttagaggggtttgaaattttgaggagagcgttgtataataatcaaatcctacggtatttatatccaaaccaaaacggtgccgcagacaaaaggacggaggcagagctatgaagcaggcggaatcttataagattatcgacgcgcacacccatattttcccggaaaagatcgccataaaggccagcaaaaatatcggccatttttacgatattcccatgcgctatgacggcatggcgcacacgctggtggagagcggcaggcgcatcggcgtatccaaatacctggtctgttccacagcgaccaagcctgaacaggtcgaaagcatcaacgactttgtggaaagcaagtgcaaacagtatccggaatttttcggatttgccacgctgcatccggcttatcccgatatcgagcgcgaactggaccggatcgcccaaaaagggctgcacggcatcaagctgcatccggattttcaggcctttgatatcgacgcgcccgaggcgataaccatgtataaggccatcgccaagcgaaggctgccgatcttattccatacaggggacgaccggtatgactattcggcgcccaaaaggctgtatcacgccatgtccgaggtgccggacatggttagcattgcggcgcacttcggcggctaccggcgctgggaggaggcagaccggtacttgcaggtgcctaatgtgtattttgatacttccagcagcttatttaagctctcccccgatgacgcgcgggcgatgatcgcccatatgggcgaggaccggttctttttcggcacggattacccgatgtgggatcacgaggaggaactggcgcgctttatgaacttgaagctttccagggaacaaaacgaaaagatcttccaccagaactttgagaagcttttcggcatccaggtgtaaaatacaggctatcgcggcccgccaaaaaggcgggccgctctttttatctgtaatcgacagaaaaagttaagaaagccttaagctggatttgcgcagacgatgatataatcaatgttctaagaaggcttggaggattttggatgcactatatgatgagctttgttttagaggctgtgctgggatttttggttggcgtttttccgctgcttgcgatcttttggctctggcagcggcgcaaagtaaggcgcttgggcggaaagatatacgccgtacatacgctgggggccgcattcttcggcatcgcgctggtagggatgctaggggtcacgggggtgccctccgtcggacagatccattttagccccaatatcagcttgatcccctttatcgatgcaggggatacgggcgtgcagtacctgccaaacgtattgctgttcattccctttggcttttttctcccgctgctgtggaaaaggtttgacagctggggcagggcgttgctgttcggggcgggcatgtcgctggcgatcgaaatggcgcagctgttttgctggcgggctacggatatcgatgattggatcatgaatacgctgggtgcgctgatcggctttgcggtttttcgcggactgcggaaaacggcgccgcgatttgtggatcattgcaggatacagggcgggcgaacgggcattgtaggggtggaaccttggctgatcatgctgctttgctggcttttcccactactgttgcagcccgtggtgtcagagacggtctggagcctgttttattaatttgaaaaagccggccaaaaggccggctttaaaggttaagcgcggtttactttgcaaataacggggcgatctgcgcgcgcaggctaccgggaaccaactcgatctgtccgtccgccagccctagcttttcgctaagggccgcatccggccagaggatatcgtccgcaaaatcgatgcggtattcggttccgtccccggctttcaagataagatattctcccggcgtcacctcatttttctgggggctgtaaccggctgtgtccaacgcctggcgcagtgcggcgggcgcgtccgcgctggtgcccatccaatccccctccgcgctgaaccattgcagctgctgggcctgatccagcaagttttgcagcgcggctacctgggcgccgccgggggtgtagaacgtatagccttgggccagaccctgccacaggctgtccgaggcgtaggcatactcccacacggcgctgccggccaggtgatagcggcgggccagcttacttttgagggagagcgcctgcccatcgtcaaaccacattttatgcaggttgttatccgtatccacaaactcgtaatagcgcgccgcttcaggttccgtccatgtcccctgtgcgttccattggctgacggtgacggtattgccccgcagatcttgatagctgccctcctccaacaggcgctggatgtgccggtcgtagaccggtacggtcatcttgctatcggttttccaggcggggaggtattcgccgccctgctgggtataggtgtaatcccgcccgtaaaagggcacgcccagcaggactttatcggaggggaccacctccagcagggtctggagggaggcgtccacccattccaggctggccaccggcccatcctcctgggagaaagaaccgttttgatcgtaggccattacgcaaagataatccgcatgttgggccaacgtttcatgatcgtagcactgccagaaattgttcgggtccggattgcgcatgcggatattggtgcagaccgacaggaccgttccctcgggcagggcggcgcggcactgggcgataaagtcggaatacagcagtttatcgtcggggtccatattttcaaagtcgaagttgacgccgtcgagctgataatcggtgacgtattgcgccaactgtgcggcgaaggctgcggtatgctcctgcgagtggactaatgccgcggaaagctcgggcgtcatactgacggcagtcccccagatcttgagtccgtcggcatgggcttgcgaaacgaactgggcaaaatcgcaggattcacccagctgcgctatggtcttgagctccggcttctcagcggtgccctccacgtagaaccaggtgggggccagcacgtccagcccttcgggacgaccggtataggtatgcggccggtaggcccaggcgatggttagcggttcgggcgattgagcggaaatattttccagccatccggcagggctggtcttgggggctttgcgcagccattcgggaatctggcgggccacaagtacccctcctgccagaagaatggcaagcaaaatggctagaatgacccaaaggggccggattttaaagtgacgtcgttgggtagaccggggaaattgtatatgcgcgcgcataactgccctccaattttggtttgttttacaccagtatagcatagcccgccggggaatgctttacccgcgaaagtcttttacacgatccttacatggcctgtgatggacgaaattacgccggttgccattaagatagtgttgtgatagaataaacgagttgacgggggagaggtaaaaagagctaggtggataatgaaaaaagagtcatttaaaaaagctttaagctggtttaacattatctttacggtcagtatcgtggtggtattgatcgtgatggacacgaacaacggcgggcaggagatcctctggcagcagcttcagccgggatggctgatggtggcgttgtgttcattgctgctatactggttgacggatgcctgcctgctgcattatatgatcggcgtactatacgcaccgcgcataccttaccgcgtttctctgcggaatgccatgttggggcatttttacagcgcgttgacgccgttttccagcggcgggcagccgctgcaggtcttttacatgtcgggagacggcatcccggtaggcgtttcttccagcgcgttgctggtcaagttcatcgcctatcagaccacaatcgtgaccgggtgcctggtgctctttctggcgcagatcggcagcatcgttgcccggtttgatcaacggctgctggtcatcacacttttgggcttcctctttaattttatgatggtgtttatcctgatcatgatcatggtcagcgaaaaaacggtggtcaggattgtgcacggcatcttgaacctgtgttgcaagatgcgcattattcgccataaggaaaaggcggtcacccatgtggataaggtgctggccgactaccggcagtccattgggtttatgaaaaagcaccccaagaacctggcagtgatgatcggcctgacggtgctggagctgattttttatttttccattgtctattacgtctaccggggctttggtttgtacggcgcccggcagattgattttatcgtagaccatctattgcactatatgacggtggcgttcgcccccacgccgggcagcgcactggcggcggaggcgggattcttcgctttctttgggcagaacatccccagggagctgcagttttccatgatgctggtttggcgctgcatcacctattactcctgcctgctggtaggcggcggcatcgtgatgtatcacagcatgcgcaagctttcgcgccggcgccgggctaaggtggatgggctgatgatgcccgtggaggaggaagtgcgggtcgagccgcatcccatcggagaagagccggaagcggcgcagagtgactgcgacccgccggttgataccgaaaagtaaagcaaaagcgccaggttaaagaaagagtataaagaaatccccctgcatctcgcagggggattttcttatacggaccaggcttagatgccctgggcctgcatggcctcgaccactttttcaaaaccagcgatgttggcgccgatcacataattgcccttggcgttatagcgctcagaggcgtccgcgatcttgtggaagatgccggtcatgatatctttgagcttggcatccacttcttcaaagctccagctgaggcgctcgctgttctggctcatctccagagcggaggtggctacgccgccagcattggcagccttgccgggggcaaacagcacgccgtttttctggaagtactcggtagcctcgatggtggtgggcatattcgcgccctcgcccacggcctgtacgccgttagccaccagcattttagcatcctcaagatccaactcgttctgagtggcgcagggcagggcgatgtcgacctttgcctgccatacgcggccggactcggaatacttagcgttcggacgatactgggtgtactctttgaggcggccgcgacggccttctttgatctgcttgaccgcgtccagatcgatcccctcttcgtcgtagatccaaccggtggaatcggacatggtgacgaccttggcacccagctgggtagctttctcggtggcgtagatggccacgttaccggagccggagaccgcgcaggtcttgccctttaagtccataccgttgtagcggagcatctcgtcgaccaggtagagcaggccgtaaccggtagcctgggtacgcaccagagagccgccgtaggtgaggcccttgccggtgagcacgccctcgtacaggttggtgatgcgcttgtactgaccgtacagatagccgatctcacgggcgcctacgccgatatcgccggccggtacgtccacatccgcgcccacgtatttgtacagctccgtcataaaggccttgcagaaagccatgacttcgcggtcgctcttgcccttggggtcaaaatcggaaccacccttaccgccgccgatgggaaggccggtgagcgaatttttgaagatctgctcaaagcccaggaatttgatgataccggtgttgaccgaaggatggaagcgcagcccgcccttatagggaccgatagagttgttaaactggatgcggtaaccggtgttgacctgggcctgccccttgtcatccacccactgcactttgaatttgacctgccggtcgggctcgacgatgcgctcgagtacggcatcgcggcgatactcatcctcatgcgcttcgactaccatgcgcagggactccaacacctctttaacggcctggagaaactccggctcgctggcattctttttagcaacctggctgagtacctcgtctacataagacatacgatcaatctcctttgcgatagatttggatctattcatttggagggaacgggagatttcgcagcctgcaaattgtataattatacgatttgcgccgccctctgccattgcgcctccacatgaaggataaagttacataaatataataatcgcaattccggcatctgtccataaatttttgaaggttggatggattttttctgcaaattttatgggcgtgaacatgcaatatgtgtgcaaactgcacactgcgcaagcagatcaaggcgtgcatagacggttgaaaccactgtggttagcggattccagacgatagcggataggtcaaagcggttttgcaattttttggccgggggcatgcaggccgccggcatagcggcgcagcctgcgccaaggcgctgaaacgggacaaaatgagggcctggtgcgcagttaaaacttgacaagttatgcaatcaatcatataattattccggttaaacaaaggcgtttgacaaggagggatggtttgcttcttgatgaacgcctttattttgagcccggattgggggtgcggcaaaaccgcgcccgatggcaaataccacggcggaatgggactttcaaacagaaagggtgaagggatgttaacggcgataacgggcattaactggggagatgaaggaaagggacgcatggtagacttgctttcggaggactacgatatcgtagtgcgctaccagggcgggaacaatgcggggcatacggtcgtcaaccccaagggcaagtttatacttaatttattgccttccggcatcttgcgcgacgacgtggtcaacgtaatgggcaatggaatggtgatcgacttagagcacctggccggggagatcggccggctgcgggaggccggcgtagaagtaacgccggagcacttgaagatcagcgaccgggcggtgatttgcatgccgtaccatgtgatgctggactgcttggaggaagaacggctgggagatgccaagtttggctccacgcggcggggcatcgcgccggtatatggcgataaatatatgaagaaagccctgcgaatgggagagcttttgcaccctgagcgcatggcgcagcgcctgaagggcatattggaatggaagaacctgaccattgaaaaggtctatggcggtcaggcagcggccctgcaaaaaatgctggattggctgaaaaaatatggagaaccgctgaaaagctatatttgtgataccggcctttttctggacgaagcggcaaaagcgggcaaaaatatcatgtttgaggcgcagctgggggccctgcgggatatcgactttggcatttacccctacacctcgtcttcttccaccatcgcggcctatgcgccagtgggggcgggcatccctaaccacaagctggataagaccatcgggatcatgaaggcttattctacctgcgtgggggagggtccctttaccgccgagatgtttggtgatgaagcagaggcgctgcgcaaggccggcggcgaatacggtgcggccaccgggcggccccgccgggtcggcgggttcgacgtggtagcctcccgctacggcgtgcgcatgcagggggcggacgaactggcgttgaccaagatggacgtgctcagctatctcgagcggatcccggtatgcacggcttaccgggtggatggcgagctgacgcaagcgttccccttcaccgatgcgctggatgaagcgcagccggtgatcgaatacctggagggctgggggtgcgatattagcggctgccgcagcaaagaggagctgccggcccaggcacttgcctatatcgcctatattgaggcggctgtgggttgtaaggtgcgctacgtttcggtggggccggcccgcgagcagtacgtggtgctataatcaaatcgaccagaggtatatgcaaatacgggcactgggccattgtggcgcggcgcccgtatatggtaaaataatataataggtttggtggactttaaaagcgcggagcttggcgggtccagggcctaaaaggaggcgagactggtgaacgaaacggtaagggaaatactggcttttgtagaggaaaacgacatcaagtttatccggttggccttttgcgatagttttggcatgcaaaaaaacatctccatcatgccggacgagctggaacgggcttttcaacacggcatttcctttgacgcctcggcgatccgcgggtttatgggcgtagaacggtcggatctgtttttgcagccggacccgggcacgctatccatcctgccgtggcggccgatgcaggggcgggtggcgcgctttttttgcaacatccgctatccggatggccggccctttgagggggatgggcggtatatcctcaaaaatgcggtgcagcggtgcgccgatatgggctatacttgccggatcggcgcggagtgcgaattttacctcttccagctgaatgaggatggcgagccggtcttggtgccccacgataaaggcgggtatttcgatatttcgccgctggacaagggggaaaacgtgcgccgggaaatctgcctgaccttggaggagatggggctgcggcccgaaagctcgcaccacgagcagggccccggacaaaatgagatcgactttcattacagcgatgcgtgcactgcggcggacgatctgatcacgttcaaatccgtggtcaaggcgatcagcctgcgcaacgggctttttgcctcctttttgcccaagccttttgccgaccagagcggcagcgggctgcacatcaatatttcgttaagcagggatggagagaatctctttcaggacctaaaagaggaggggagcgtggcggccagctttatcgcgggcgtgctggaccgggccgcggagatcaccgcgtttttgaacccgcttaccaactcttatgcgcggtttggcgcctttgaggcgccccggtttatcgcctggtcgcgcatgaaccgggcgcagctggttcgcattccggctacgagctcgagcgagcacagccgcatggaggtgcgctcgcccgaccctgcgtgcaacccatacctggcctacacactgctgcttgaggcgggcatggaggggattgcgcagggaaaacggctgggccccgcgatggattttgatccctatgcgccgggcgcgcgggtggagggcttgcccaagctgcccgcaaccctggaagaggcgctggctttggccggaggcagtgaatttgtgcgccgggtcttaccgcagacggtggtggacaagtacctggaatttaaatccgcccaggcgcaccgcgttgcgcaggcagaggatagggcggcgatggagcgcgagctctattttctcagcatttaaggctggattactgggcgaaaggacggtgagtctgtggacagtggcttaatcgtatccggaaccagtaagggtaccgcctttatccaaaaagtgttgcaatcaagcggctgtgcccagatcgccgttgccaggtcggggagcgaggccaggcggctgctcatcgaaaacgagtacgacctcgtggtgatcaacgccccgctgggggacgagtatggccacgagctggccatgagcgtagccggcggcgcagggagcggcgtgctgctgatcgtcaaagcggaggcggcggacgagatctcgtccaaggttgaggaaagcggcgtgtttgtggtacccaagcccatcagcgcccagttgttctttcaatcggtcaagttggtggaggccacccgcaggcggatgttgggcctgcgcagcgagaacagcaagctaaaaaggaagatagaggatatcaaactggcggaccgggccaagtgcgcgcttattcaatacctgggcatgaccgaggcgcaggcccaccgatatatagaaaaacaggccatggatttgcggctgacgcggcgggaagtcgcacagcggattctcaatacctatgaaagttagcctggttaaggcatagaaaggagaaagcgttttggagcagacattgtatctcgtccttgagaacgggcgcgttttcaaggggaagggctttggcgccgaaggcgaagtgacaggagaggtagttttctccacgggaatgaccggatatttggagaccctgaccgatcccagttattatgggcaaatcatcgtccagacgtttccgctcatcgggaattatggcgtgattccagaggattttgaaaaagaccaaacctatcttagagcatatgtcgtgcgcgaatggtgcgaagagccgagtaattaccggtgcgccgacgtgctcgacaattttttaaaagagcagaacatcatcggcctttgcgggatcgatacccgggagctgaccaagatcatccgcgaccacggggtcatgaacggcaagatcgtccgaacgctggatcatatggagcaggacctgcaggagatcaagacttaccgggtgcaggacgccgtgcccaataccagctgtaaggcgatgtttgaggaaaaggcggaaaacggcaagtataaggtggcgctttgggacctgggcgccaagatgaacatcagccgggagctgctcaaacgcgggtgcgatgtgatcaccgtaccgtataataccaccgccgagcaggtgctggccctgaagcccgatggcgtgatgctgaccaacggcccgggagacccggcggataacatggatgtggcccaggagatcgccaaggtcgtagccgcgcgcgtgcccacctttggcatctgcatggggcaccagctgctggccttgagccagggcgccaagaccatgcggcttaagtacgggcaccggggtgcaaaccagccggttaaggatttgaacagcgggcgggtatttatctccagccagaaccatggctatgcggtggtgagcgaatcgctgccccaaacggcccacgttttctttgaaaatgccaacgacggcacctgcgagggcgtggcctatgacaacgtgccggcattctcggtgcagtttcacccagaggcctgcgcaggcccgcatgatacggcttacctgttcgaccagtttatcgggatgatggaggagaataagcatgcctagagataagaatatcaagcgcgtactggtagtgggctccggccccatcgtcatcggccaggcggcggagtttgactacgccgggacccaggcctgccgggcactgaaggaggatggactggaggttatcctggtcaactctaaccctgccacgattatgacggataatgccatggcggacaagatctatattgaaccgctgaccaccgataccctcaagcgcatcatcatcaaagaaaagccggacagcctgctgtccaccctgggcggacagacggggctgaacctgagcatgatgctggccaaagagggctttttggaggaacatggcgttaagcttttgggtgcgaacccggaaaccatcgaccgggcagaggatcgccaactttttaaggacgcgatgatcgagatcggcgagccggtcatcccctccaaagtggtgacggatctagaagcggcggtggaatttaccaacgagatcggctatccggtgatcatccgcccggcctttaccctgggcggcagcggcggcggcatcgccaataatgaggaggaactccgggagatcgcagccaatggtctgcgtatgtcccccatcacgcagattctggtggaaaagtgtatctccggctggaaagagatcgagtttgaggtgatgcgggacagccagggcaacgtgatcacgatctgctcgatggaaaacttcgacccggtgggcgtacataccggcgacagcatcgtggtggcccccgcgctgacgttggccgacaaggaataccagatgctgcgcagcgcggcgctgaacatcattaccgccatgggcgttgagggcgggtgcaactgccagtttgccctgaatccggacagcgacgagtacgcggtcatcgaggtcaacccccgtgtatctcgctcttcggcgctggcctccaaggctacgggttaccccatcgccaaggtggccaccaagattgccatcggctatacgtttaacgagatcctcaacgccgttaccggcaagacctatgcctgttttgagccggccatcgactacgttgtcgttaaattccccaagtggccctttgataaattcgtttatgccaaacgtaccctgggcacgcagatgaaggccaccggcgaggtcatggccatcggccacagctttgaggcggcgctgatgaaggcggtgcggggcgcggagatcggcctggataccctaaacatgcccaagctcaaggcattaagcgatcaggaagtatacgataagctcagcgtgtgcgacgacgagcgcatgtttgtggtgtatgaggccatcaagcgcggtgtgagcatggatgatatttataatatcaccaaaatcaaccactggttcttggccaagctcaaaaacatcgccaagatggagcagcgcctcgccagcgagccgctgaccgacgagctttaccataaggccaaggatatgggctatccggacgcggtggtccggcgcttctccggtcaggagatcgcccatccgctgtttgccagctataagatggtggatacctgcgcggcggagtttgaggcggagaccccgtacttttacagctgctacgacgaggtaaacgaggcggcccagtttatcgagcagcatcccaccgataaaaagacggtaatcgtctttggctccggccccatccgcatcggccagggcattgagtttgactatgcctcggtccactgcgtctgggcgctgaaggaagctgggtacgaggtggtcatcgtcaataacaaccccgagaccgtttctaccgactttgacacggccgaccggctgtactttgagccgctcacccctgaggacgtgatgagcgtgatccacaccgagaagccctacggggtggtggtggcctttggcgggcagacggcgatcaagctgaccaagtttttggagtctgccggcgttaagatcctgggcacctcggcggacagcatcgacatggcggaggatcgcgagcgttttgacgagctgcttgagcgcatcggcatcgcccgacccagcggttctacggtgatgacgccggaagaggcgctggaggcggctaaccgcctgggctatccggtgttgatgcggcccagctatgtactgggcgggcagaatatgatcatcgcctttagcgatgaggatattaaagaatacatggggatcatcctccagcacaagcaggataaccccatcctgatcgataaatacctgatgggcatcgagatcgaggtggacgccatctgcgatggtaaggatatcctgatccccggcatcatggagcatatcgagcgggcgggcatccattcgggcgattccatcgcggtctatccggcatggaacttaagcgggcggatgacccggcagctgatcgattacacccgggagctggcgctggcgctcaacacccgcggcctggtcaatatccagtacgtggtttaccagggcaagatttatgtgatcgaggtcaacccccgtgcctcgcgtaccatcccctacatcagcaaggtgaccggcgtgcccatggtggacttggccacccgcgccatgttgggcgagaccctggcgcagatgggctatggcaccgggctttacaaggcgccgccctatgtggcggtaaaggtgccggtattctcctttgaaaagctgcaggatctggacgtgcacctggggccggagatgaaatccaccggcgaggtgctgggcatcggcaagacgctggaggaggcgctttacaaaggattggtcgccgcgggctttaagatggagaaaaacggcggcgtattgatcaccgtgcgcaacagcgataaggccgaggcgatggatatcgcccgcaaatttgcggacctgggctttgatttgtatgctactgagggcacggctgaatggctgcgccgcgcggggatgaaggtgaccgccgtaaagaagatccatgaggcggacgataatatccagacgctgctggagagcggcaaggtcaagtatatcctgtctacctccaccaaggggcgcctgcccagccgggacagcgtaaagatccgccgcaaggccatcgagttggcgatcccctgcctgaccagtttagatacggccaacgccctggcggacagtctgcgcagccgctattcgccctattccaccgagcttgtggatatcaacaatatgcgcaaaaaacggctcaaacagccctttatcaaaatgcagggctgcgggaatgattatatctacttcaactgcctggaaaacgaaccggtcagcccggaatccctgagcgtgatcctctcagaccggcattacggcatcggcggggatggcatcatcctgatctgcccttccaaagtggcggacgccaagatgcgtatgttcaaccgggatggcagcgaaggcaagatgtgtggtaacgccatccgctgtgtgggcaagattttatatgaagagggcatcgtgccccgcgaggtcatgaccatcgagaccttaagcggcatccgagagctgacgctttgggtgcaaaatggcgaggtggcctcggtgcgggtcaatatgggcaaggcggagacggcatgtgataaggtgccggtgcgctttgacggccaggagatgatcaaccagcccatgaccatcgagggcaggcagtataacgtgacctgcgtatccatgggcaacccccacgcggtggtgtttatggataacctcaatacctttgatatcaataccgtggggccggcctttgagtttaacgaggccttcccggaacgggtaaataccgagtttgtgcaggtgatcgacagccataacctgaagatgcgggtttgggagcggggcagcggggaaaccatggcctgcggaaccggcgcctgcgcggctgtggttgcggctgcgcgcaacggctattgccccaagggcgaggagatcgccgtgcgggtaaacggcgggcggctgctggtgacctataccgacgaggccgtctacctgtgcggggactgcgtcaagatcttcgacggcgtggtcgagatttagcgagagaagtttggagtaaagaacatggcgagagactatgcaaaagagctggaagcgcgggtggcctttattcaaggccagctgcgcgatagcggggccaggggcatcgtatttggcaacagcggcggcaaggacagcgcgctggtgggcatcctgtgcaaaaaggcctgtgacgacgtgctgggcgtgatgatgccctgccagtcaaaacggaattttggcgaggacatgcaagatggcctggccgtggcccggcagttcggcattgagaccaccacggtggatctaagcgatgttaagaccgcgctgaccgatgcgatagccccggtgtgcacggtgagcgatgcggccagcgccaatattgcccccaggctgcggatggcgacgctgtacgccattgcccaaagccggggcgccctggtggccggcacgggcaaccgctcggagcggtacgtgggctactttaccaagtggggcgacggcgggtgcgattttaatcccatagcggatttaacggtgggcgaggtctatgaatttttggcctttttgggcgcgccggagaatatcattcaaaaggcgccctccgcggggctgtttgaagggcagaccgacgaaggcgagatgggcatgacctacgccgctatcgaccggtacattttgtctggcgaaggggaggcggagacgatcgaaaagattacccgcgcccatgcgcgcagcctgcataaattgcagatgcccgcgacgtttggagggatgcaggatgcggattaatatcaactatcaaaacttggaggatagctatctgttctccaccattgccaaaaaggtggcccagcagagcgcggagcatcccgagcaaaagattattcgtttaggcatcggggatgtgaccctgccgctgtgccctgccgtaacggatgcgctgcatgcggcggtagatgagatgggcaacaaggagaccttccacggctatgggccggagcaggggtatgacttcctgcgggagggcatccggggctattacgcacaaaagggcgtggcgctggaggcgggcgaggtgttcatctccgacggcgccaagagcgacctgggcaatatcctggacttgttcgacagggacaatatcgtgctggtgcccgaccctgtatatccggtttatgtggataccaatgtgatggccgggcgaaagattttatactgcgatgcgacggaacaaaatgggtttttacctccgccgccgcaagaggttgaggcggacattatttacctttgctcgcccaataatcccacgggcgcggcctacaaccgggagcagctgggcgcttgggtggcttatgcaaaggcaaatggcgcggtgatcctgtacgatgcggcttatgaggcctttattcaggatgaatcgctgccccgcagcatttacgagatcgaaggggccaagcaatgcgccatcgagttttgctcgctctccaagacggcgggcttcaccgggctgcgctgcggctatacggtggtgccgctggcgctttgcggcggcaggctgaacgccatgtggctgcggcgccagaccaccaagtttaacggcgtgccctacatcgtgcaacgggccgccgcggcggtattcacgcctgagggattaagacagattgaggaaaacctgggctattaccgggagaacgcgcgcatcatggcgcaggcgctgcgggagatgggcgtctggttcaccggcggggagagctcgccttatatcttcatgaagtgcccgggcggtatggattcctggcagtatttcgacctgctgctcaaggaggctggcgtggtgggtactccaggcgagggttttgggaaaaacggcgcgggctttttccgcttaacggcttttggagagcgggaagccacgaaagaggccatggcgcgcatccacgcgctgcatgaaaagctgtaagatataaagggataggaaacgggggtggcgcagatggcctgggcgatcgctatcgcggcggtattggcgctggtatatttggggatcggcctggtctttgctcgccgcgccatcgatccgccgcggcggctgtataaggatgtgctgcgcgaagaactggaatgcggcaacctgaaagacgatacgttgttacagctgcccttccagcaggtcagcgggcaatcggttcggggctgtccgctggtggcgcgcctttaccggcccaaggaaaagagcgcccgctacgtactgtttttacatgggtacaactatccctatatcagcgcgctgaagtatctgccgctttttttggagcgggggatcaacgtgctcattcccgaccatgcgggcgcgggggagagcggcgggcgctatgctacctttggctattttgagcagcaggatgccgtcaactggttagggcgcatccgcggctgggccagggacgagggattttccgtggcgcagatcggcgttatgggcgaatccatgggcgcggccacggcgctgctggtggcgcaaaaggctaagggcctgcggttttgcattgcggattgcccctatccgtcctggatggcgatcctgcgctatcgggcgcgggtggagatcggcccctgggcggtgggctttatccccgccgcgcggctttggatctatctgctatccggcgcgcgggtcaaaaaggtggatatcgcggcccacgccggagagattggtatgccggccatgatcatccacggcgaggcggacgattacatcccctgggcgttgagccataaaattattgaggccaacccggccatcgcttatcacctgatccccggggccaggcatgctcagtcaatcggccgggcgccgaaggcgtatcgggagatcgtgtggcagtttttggatcaggccggattttaagcgcgagggcgccgcgcggcggcaaaaattaaagacgaatgcaaaagggagatcatcctgggatgatctcccttttttaggttgagttatgatgagagcaactcttcaaagctcatctttaatacgttggagaaggccaccaattcaatatccgttacaaaccttttgccggcctcgatgcgctgtatcgcgtttttgtccaggtccaggccgaaaacctgcatttggtcggccagctgacgctgcgatattttgacgctttttctatattttgcgatatttttaccgcaaaggttatttaatccgtcttttgtcttattaataaacatgttccaccgtttatgacatttagtgattgtcaacatagaaagtatatgctatattaaaaacaggttgacattcactaaatgtcaatttagctgaaaggagcctgtttatgcgaaggattatcgcgggctgtatgctggcagccctgctgatagggtgtgcaggctgcgccttttttaatcctgaagccgtgcgggaaacccaggccgcgcgctcttcgccggcggagccgtcggctggagatgaaatggatatcggggatacgatcaccacagagcattgtcgagtgacgatcgaggcgatagagctggcatatgatgtgctgccggaaaaagaggacgggctgtttacacactacaaggcggccccgggtagggtgtatatctgtgtatcgttggagataaaaaacaggacccaggccgaactgcgctgcgacgagctgggttgggcgacggcccgctataacgggaaccaacaatacagatctttcacggtcgtagaagatgcctatacaggattcgcccttgcaaacctgtccgttatccggcccggggaggtgcagcgcatcaagcttctcatcgagtgcccgcagcaggtccatgaaacccgggcgccgttatggctggcttttgatattgacggaacaagctttaaatacactatccgggaataaaacagctgccttatgtatgaataaaaaacggcctttctcggccgttttttcaataattgcgggtagttatgataggcttaacgcaacggatactcgtgatccggaccaatccaatccgaacgacggtcgcacatcagccaatagtttacccgcccggcaatgggttcggtatcagtaggctgtttattgaccgtagtgcataagtatagccctggagctgcacggcgcacttcatcgataccataattctgcacagcatcttcagcaaagtattgccaatccatgatcagcgcgggtttgccatcgatacctgaaggaccgatggcccatccaaattgattattacgcacgatggcaccgttgactcgccaaatgatgtagccatccccttgcgcgccttccttgatggggtttgggcgaaaggctttgcctaaaaactcatagggcttttgtagcatgactggctgcatataaatcaaggtatgcccgctgtattcgccgtttaattcgtctggcttgggcgcaggcagactggcgtagacgatttgacattgttcgtattttaaaaacaaaaggtcttctaacgtccaaccgtttcggtttaaggcccagtgaatatttttcatcttataccccccttgagaatcagtgcgtctttatttataattttaactaaacttaatgcgttaaactaccgtaaatggccataaaaattacactatcgcgtatttggggggataaggtgaaatatgatattgataaagacttgtctcaaacaattgaatttgacgaaggatttctatcggttaaaacgataagatttagtacaacgaaatattcaccggtaccctttccaagtcattggcactttgcttttgaggcggtggtgctgcttagcggtgagatcgattatattgtcaatggccagcattataaacttatgccaggggaagggatattgattaattctaatgcactgcacagcagtgtttgcagtgagacgtgcgaatctaaaattttattttttagtccgcagatttttagggagaatcattatatctatcataaatatatagaacgggttacgggtagcgcgttggctgccgtattgattgatggtagccaaaagtggcatcatcaacttaaggatagtatggagcaagcgtttgatgcttgtagccttgccgaggatggatatgagctggaggtgctacgctgcctatatactgctttgcaaacgctgacgaaaacgctaccactacagcctgatatggggagagccataaaacaagagcatatcaatacggtaaaacacatgattgattatatccagaatcattatactgacaaaattggtgtagacgacattgctggagctggagcggtttgccgaagtacttgcaacaatttatttagagagatattaggacaaacgcccatcgaatatctgatgtgctttagagtggagaaaggtagcgagatgttagcacgcggtgccacagtaacagagagcgccatggcctgcggctttaatagcgttagctatttctcggaagtatttaagcggatacgaggcataacgccacaaaaagccaagcattaagatggatgataaaaaaggcgcgcggttttaattccgcacgcctttttatcatcctatatagggcgccagcaggggctggagctggcgcccctccaacgccgcttctactgtggggaggatcagctcggtgtgggagaccagggagttgggctttttggctacatcgtcctggccaaagggaacgaagtagaaatgcttggtattgagcagctggccgatattcttggcgctgcccgatagcgcatcgttggtggagatggccagcaccaccggacgagcgctgcgcaggtgcgctttgcaagccatcgtgacggggccatcggtgatgccgtttgcaatcttggccagggtgttgctggtacagggggcaatgattagcgcgtcaaacatctttttggggccgatgggctcggcctctacgatggtgcggatgctgcggcggccgcagatctgttcgatcttttcgatccagtctgctgcgcggccaaagcgggtatcgactgtggcaaagttctcggacaggatggggaccacggtggcgccgctgagcaccaggttttcaatctcaggtagcgtgcgctcgatggtgcagtaagagccggtaagggcaaagcccagcgttttgtacaacatggtaagacctgcctttcctaaggattggagggagataagggcgcgtaccgcttgagataatcgtaaatgctttcgccggcggattgcggagagagtgcgccaggcagaccgggcgcagataccagcttaccagggaagtctagcacgtcagacagtccgcccggactggaagccagctcgatccatacgctgtgcgcggcgaacagatgagtatggcgcgcatccagtaccggcgccggggcggtgttgaggatcaggggatataacacctgggattgggaaagggcgatcagatcgggcagggcgtaaaaaccggcgatgcgcgccttctcccgctttacggggtcgcggatcaagatatgtacccgtgcgcccagggcctgcagctgtgccgccaacggctggccaatgcgtccgtatcccaaaagcaggaccggcatgccgcgcagggtacgcggcgtgctttggatggccagggccaatgcgccttctgcggtcagcgcgtcgttttgcagcgcgtaacattcgtcctccagcatgttatgccattggagcgcccgcgccttgatcacttccattccctcctgcggcggggcgcctgcgtaaacggctgcgcccagcggcaacgattttagcgcccgcacaaacgcatcccccttggaattgggggcgaacacgtattgctgcgccgtttgctgccggttccgctcaaagggtgccgcctgccagccggctcgggtcatggtcgttaaaagcgcttccatccgcgcgtcggttaagtcgatacgccattgcatgggataccacctccgtttcctcaatctatgtcgaggtgcccaaaggtgtgaaatttacttaagacaggcacgaaaagctataccggcgcatacccttaaagcgagaaaaaaggagggatggctttatgaaaggcgaacggcactttttccccggtgggaataccgtccggggattttacagttattatgcccatgcgatccggcccgggctggacaaacgggtgattatcctcaagggtgggccgggggtgggcaaatccaccctgatgcggcatgtgggagacgcgtttgtaaaaaagggctatgatgtggaatggatgcattgctccagcgacccgggcagtttggacggcgtgcgcataccgaaagtaggcttggcgctggtggacggcaccaagccccatattgtggaccccgtgctgcccggcgcggcggacgggatactgaacctgggcgtggcgctggacgaggcgggcatggcgaaacatgtcagagaagtggaagagatcggagaggcaatctcgggctgttttgcccaggcctatcgctacctagcagcagcggcgccgctgcgcgaggatgaggagatcatcctgcgcggggcgttggatgccgggaagatcaatgcggtcacggcggagctgttggctgggctggacgccaacagcatcgccgcccggcccggcaaagagcgcaggctgtttgccggcgccgttacgccgcttggctgcatccattacttaaatgagctgggggcccagcgggtctggcgcctggaggggccctgggccatgccggcgcaggatatcctgtcgagggtgcgcgcggggctgctggagagcggcgtggatatcgagggcttctattgccctatggaaccggagcgcatcgagcatctgctgatccctgaaaccgggcttttgatcaccacggccaacagctaccagatgatggcccagacgcccgagcgggtgatcgacctggaggccgcgctggaccgggaaaaactgagcgcagccatccaacggcggctgtacaacagccagacctttgacagcctgatcgagcaggcgtcccagtccgttacccgggccaaagacctgcatgacgatctggagaagatctatattgcccatatggactttgcgcgcgtcaccgccatgcagcaggcattgcttgcgcagctggagacgctggggtagggacagatacaccttgccgtccggaccgcgggaaaagcccgccgggccgggcggtcttttgtttagatgcggataatgtgccgcttttcggaagaaccgcaggattgtcatagataaatccaggaattgaggctgttttaaagcgcgctacccgctataataagggtagagaggcagaggtggcgcgggatgtattacgaatacgagatcgtaaaacatatgaagagcctgccggtacaggcgtttttcgtcagcatcgggtggcgtacccaccactggcacgaggagctggagttgctgctggtgctggaagggtccgctatgctcaaaaagagcgacagcgagctctgcctgaaagaaggggacgtgtatatcctgaacgccaacgaggtgcacagtctggcccgtacgggtgaggataacctctttttggccctgcaggtagacccgcgcttttgccagaattatcacccggagctttccggtgtcaggttcaaaaacagccacatcccatccagcgatcctttggcggcccggatcggccgcgccatggccgaggtgatgaagcgcatcagcgggaaagagagcgccaacgccttttttgtaatggccaggatcaatgagattttcgggatgctgctgcagaacctgccctttgagcagcgcagcgaggatagcgatcggtatgaatacgtgggcttaaaccggctgcgccgcatcatcaagatgattaacgaacagtacatgggcaagatcacgctgcaggatatcgcccagcaggaatatatcagcaaggatcatttatcgcactttatcaaagataaactgggcatctcctttcaggagtttgtcagcaatgtacgcctggaaaaggcgctgacgctgcttaaaaacaccgatatgagcgtgctcaacgtttccattgcctgcgggttttcggatgtgaagtacttaaaccgcctggtgcaaaagcgctatgcgtgcagcgccacagagtaccgcaagcgcgtgcggcaaaacggcgaggcggagtacccggtggcggccgatggcaagcagcacttcccggtggatctggacagcgccatggccctgcttgaggtgtacgaggacaaggtggcgcccaaaaaaggttgctaagcggctgtaaatttgcggccgcatggggataaaacgcaaattatacgaagggggaatctgtgatgagtatccgcttgacggataaggcttcggtgccggcggtggtcgccgagatgacgctggaggaaaaggcgcggttggtgacgggcgagttcccgtttaccacggcggggattaagcggctgggcatcccgcccatgcggccgctggatgggcacaccggtatcaatatgggccagctgcgcagcgatatggccagcaagaccctggcgaacaagagcgtggatgagttgggcgagatgagcggcccggcgatctcgggctttggtacggtgatcaccaacgctaaggatccggctaaacgcgccaaaatggctccgtctatccagaagctggtgcaggaagtgctggataaggtggatgagctgatgcccgacggcatgtacccgggctgcttcccaccgggcattatgcagggctctacctggaacccggaagtgattgaaaaagagggcagcgccgtgggcaaggagatggacgcctataaggtggacgtatgcctgggccccaacgtgaatatccaccgcgacccgctcaacggccgcctgtttgagggctattcggaggatccgtatgtaacggctaccctggccccgtactacatccgcggcatgcaggcagagggcgtggcggcggacgccaagcactttgcggccaacaaccaggagacccaccgccaggagatcgacgagcgtattccccttagggcgctttatgagatttatctgcccggctttaaggccgcggtgcagcagggcaaggtcaagaccctgatgagcgcctataacaagatcaacggcacggcctgcgccctgaaccactggctgctgaccgacgtgctgcggggcgaatggggctttgagggctttgtggtttccgactggggcgcggtatacgaccaggtggatgccattaacgccggtaacgatctggagatgcccggcccgctgacctttgataagatcgtggccgcggtgaaggatggacggatcgacgaaaagacgctggaccagcgcgtggccaattacctgaacgtattggtagagctgccggtgatgaagggacgcaaaaatgcgcatatcgaccgtgagtattcccgcaaggctgcatacgatgtggcagctgagggcagcatcctgctcaagaacgagggcgcgctgccgctgaacgagggcgccaagatctcgctgatcggcgagcacgccaaagattatatcatctgcggcaagggcagcgcctttatcgataccgaccaggccaccaacctttacgactgcgcggtggagaccctgggcgcggataaggtggaatacggcgacgtttctgccgacagcgacgcggccatcattgtggtcagcgttgacgggcaggagggcagcgaccgggccgacctgctgctggcgccgggcgacgatcagatgatcctggatgcggcgaaaaaggcgcatgccaatggcaaaaaggccatcgtgatcctgaacgtgaccggcccggtggagatggaaggctggctcgatcaagtggatgccgtgctgtgcgtttggctgccgggcatggaaggcggacgcgccacgctggatattttgaccggcaaggtcaacccctcgggcaagctgacgctgaccttccccaaacattattacgattgccccacctacggcaacttccccggcgatggagatgaggtgtggtacggcgagggcatctatgtgggctaccgctattacgataagaagcatgtggagccgctctatcccttcggctatgggctgagctataccacctttgaattgagtgatattgccatcgaccgggacgtgatggacatggataagggcgagaccgtgaacgtttccgtcaaggtgaccaacaccggcaaggtggcgggcaaagaggtagtgcaggtgtatatttccgatgaggtatccaccctctctaagcctttaaaggagctgaaaggtttccagaaggtcgccctgcagccgggggagagcaaggtcgtcaccattgccatcggcaaagatcagttggcaagctacgatccggccgccaaggcctggggcagcgagccgggctattatcaggcgctggtaggcacctcttcccgggatatcgcgggcgcggtgcgctttaaggcggtgggctacaacccgtttggctatggcgtgaactgctccatctgcaagatcatggccaatcccgcggtggtagaagccatgaaaaagtacatcccggcgcacctgctttcggatgagtccatgagctcggaactgacctatttcccggaagccaagctgcaaaagatttggaacgagaaattcagcctggccttcaaggataagagcgagacggaaaaacaggcgattctggatgcgatgtgcgcggagatcgccaagatcgaggtcatttaacccttttgccgcacggttaaaaaaatagacgcaaaaaagcctccggccatgccggaggcttttttacggggttagatcacaaacccgccgttggggctgagcacctgcccggtaataaaatcggcggcgggggaggccagaaaatataccgcttgtgcgatatcctccggccggcccagcatgcccagcggggtttcatcctttaagatggatagcgtgtcctcgtccagcagggcgttcatatcggtatccaccaccccgggcgccacacaattgacctggatgtgcgagggccccatctctttggccagcgcccgggtcaggccaatcacgccggccttaacggcggaataatgcacctcgcaggaagcgcctaccagaccccagatggaggagaggttgacgatcttcccgcattgcctttcgatcatcccgggcagcacttcctggcagcagttgaacggtccggtcaggtttaccgccaccatgcgctgccaatcctgcgcggtcaggtcgcaaaatagcttttgctgggcgatgcccgcgttgttcaccagtacgtccaccgggccaaggtgatactcgatgcgctgcaccatgttgtgcacctgggcgcggtcggctacatccgcctgaaagggcagggccttgtgcccctgggcggccagcgcatcggccagcgcctgagcggcggactgattttgacagaagtttagcgccacctggtacccttcctgggcaaagcggcgggcgatggccgcgccgatcccgcgggaagcgccggtgaccaaaacggttttgggcatggttgactcctcaaacgcttagtttaaggatagtataaagcgcgaagcgggattaagcaaggccgccataagggaaagggttgtgttatactgttaggaaagaggaagggattttttatgctgaaacggatcacagcccaggagctgaccgcttggcgggaggcgggcagggcctttgtgttgctggatgtgcgggacggggatgaatacgctgccggacacattccgggcagcatcaatatccccgtgcgggagatcgccgatcagcgggacaagttgccggaagatctgctgatgcccttggtggtgtattgccaaagcgggatacgcgcccgccgggcctgtatgctgctggatcagatcggatacgcggcgctatatgagctgggcgggatatccgcctggccgggggacttggagcgatagaaaaataaagggaagaatggttatggtaaacaaggaacgcgaagcggggctggagattttagcggaacggtttggacgcgattcgctgctcgccttggcgacactggagggggacaggcccgctgttcgcacggtaaacgggtattatgaggagggagcgttttacgtcatcacctacgcgtgctccaacaagatgcggcagattgccgccaatccccagattgccatctgcggggaatggtttaccgcccacggcataggggaaaacaggggatacgtgcgcgccccggaaaatatggcgcttttagaaaagctcagaaaagtgtttgccgcctggtacgataacgggcataccgatgaaaacgaccccaatacctgcattctgcgcatccgcctcacggacggggttctcttgaaccggggcaaaagatatgaactgatctttgcgcgggaggaaataaaggctccgcgcttttaattgaaaccgagacaaaaagccgcgccagatttctgacgcggctttgataatataaggcgctgcataaggtttaggcgactcgcgctgggaccggccgagagtgtcctttaaactataccgacattgagatcctcgaaaatttctggcgaggccatagtcagtcccgccaccggcggatagcgccacagcttttgcggcgcgtagaaccagcggccggacagcgcttgtaaaggggcgggcagcgccggagcaaaatggagcgcgcacgcccaaagcgcctgcgtgcgcaggtgcagcgcacggttatgtgcccggtcgccatatcggtcgtcgcccagaagcgggcagccgatctgcgccagctgtacgcggatctgatgggtacggccggtgtgcagctgtacgtgcaacagcgcgccgctatcgccgcaagacagggtctcatactgtaagatcgcctggcgcgtgttggggccgggatgctgggctacccatacatgggcgccgacggcatctttatagaggtaatggcgcagttcgccccgcggggcctgcggcgggcgggtggtaaaacactggtaatgcttcccgatcttttggccgcggaaggcttccaatgcggcggcatggctttgagggttcttggcaaagagcacaaggccggctgtctgcacatccagccggtggcaggcagcgggaaataaagcttccgccggattgcgcagccgcgcctccagcgaatcctcgcctggcctatcgctttgcacgggcagcccctggggtttatgggccaggaggacggcttcgtcctcaaaaagaatatcggcgcgtgggcggggcgccagctccgcatctggaagatacacggcgatggtctgccccgcgtgaacgggcgccaccgctttgacccgctggccgtcgatccgcacgtcttttttgcgcagggccgcacgcagctttgaataggaaagcccgggaaaggcgtgcagaatcacgcggtccagtttttggccatcctctttaggcgatacggtaaaagactgcatggcgtccctccaactcgattttttatgaggctattataccacgccttgcaattttttcgacttttttaagcatgcggcgcatataattccctacaagagggagggagcagaatgcagcatgtttataaccagcttattgtaatgcatgagcagatgcagggctttggaagcgaaaaccgcgcccctatcggctattgccggttggtgaagaaccgcaaggatcaatggcattgtaattgcgtgatccggcatttggcacaggatcggggacagtactatggcgtgctctgttttgcaaatgataaagaggccccggtggtactggggcagctccatcgggatgcgcgtggggagtatggcctggatacggtgctggaaaaagcggtgcaccagccttttggcgggtgcagcgtagtttgcctgtcgcctagtgaggcccggatgcctgagactgtagtggccggcaccacccgcaatggcgtggcaggtgggctagacgccctggtgatggaagcgctgcgcgcaaaggggatggctccgcgcgttgcggcgcctgtgcgcgcggaaaaggcggcggccataaaagccgtggatgcctcagaggagccggagcctgaggttgaagagccgcaagatcagccctttcctgaagagaatgtggaagcggctgagcctcaggaggagatagcggccggcgatgcgcagcctacggcgccggagaaagcggaggtggcggctgtgcaggatgaggaagagcctgtgcaggagacctttgaagcgaaaacagaaccagaagcactaaaggcgcagcccgaagcggaaccgggtacgcaggatgaaacgccccagtgggcagaaagtgaggaagacacagccgccctagaggcggagccccagcggctcgatgcacctttacaagaggaacccgccgggcaggaggggtatgacgacatgccggatatccagctgcctgatggggaatggcgtttccaaccgctgaagccctcggcggggctgcgggcctggcggggcaagaaagcggatgacggggcgcgctgctggctgctggagggggcgccctcggataaaccgcccatcggatgggagcaggccttctgggcgcccacgcgagatggggcctcgggctgctgggtgctggtccaaaaaccgaggaattagaaaatatcgcaaaagtatatagtgtcatcttatgcggagccctgcaaaatgcagggctccgcacattgcgttatcaaaatgtaacaagcctcaaaccctttggtgatgcgggtttgggaagtttagggaaggcgacgcacgggggattgttcacaaattatttacacattcagtgcctatccatgctataatcagaggcgaaactcattaaggggggcaggacatgatccagattgatcatttgtctaagcgttacggggaaaaatacgccgtaaaagacgcaagcttcacggtggaaaagggcgagatcctgggctttctgggccgcaatggcgcggggaagtcaaccactatgaacattattaccggttatatttcggctaccgagggttcggtgtccatcgacgggcacgacgtgcttaaagagccgcaggaagccaagcgccatattggctacctgcccgagcagccgccgctgtatatggatatgacggtagacgagtatctaggctttgtgtgcgagatcaaaagtgtggagcgcagcaagcgcaaggcacatatggcggagatctgcgagttggtgaagatcagcgatatgcgcaagcgcctgatcaagaacctctccaaagggtataagcagcgcgtgggcctggcgcaggcgctggtgggcaacccggaggtgctgatttttgacgaacctaccgttggccttgaccccaagcagatcatcgagatccgcaagctgatcaaaaacctgggtgaaaagcatacggtcatcctttcctcgcacatcctccctgaagtggcggatgtgtgcgaacggctggtcatcatcaataaaggcgagatcgtagcgcaggacaccctggcgaacctgacccggggcatcagcgagtcctcccggctttcgctgcgcgtactgggggctgaaaaagaggtgcgcaaagcgctatatgatattaccggcgtgcgctatgttgagatggtcggctccatggagccgggcacacatgatttcatcctggaggccgataaggatacggatgtacgcaagatggtgtttaataccatggcgcgtatgaatacgccgattctgaccatgcgtccgatggatatgacgctggaagatatcttcttgcagctgactaacgaagacaagggggccaactaaaatgctagcggtattaaaaagagagctgaaggcatatctgctttcgcccatcggctatgtgtttatgggctttttcctgttggtggtgggcctgtttttcgcactcaccaacttagcttcgctcagttcacagtttaattcggtactcagcagtatcagcctgatcttcctgtttgtcgtgccgcttttgaccatgcggctgctttctgaggagaaaaagagcaaaacggatcagctgctgctcacctccccgcttcccatctcttcggtggtggtgggaaaatatctggcggcggtgtgcatgttcttgctcaccatcgtattgacctttattttcccgattattctaagcgcgctgggcgatccttccgccagcgagatcgctgccggatacatcggctttttcctgatgggatgttcgtttatctcggtgggcctgttcatgtccgctctatccgaaaaccaggtcagcgcggcggcctccacctttgcgctgctgctggtgttctatctgctggatgtagtcacgcccagcatccaggtggactggctggtcaatatcctgagctggttctccatcggctcccggttgacggattatatttacggcgtggtttcgctttcttctactatatattatatcagcttcagcgcaatcttcgtcttcttgaccgtccgcgtactcgagaagagaagatggagccagagctaggaagggggcggagaaaatggctaaaaacgaaaagcataagttcaataaaacgcggcttaaatacggttcctatgccgccattattaccgcggtggttattgcgatcgtcatcgtcatcaacgtattggtgggcacgctcagcgataagtatagcctgacgctggatatgacgcgaaatcagctgttcagcctgtccgccgatgcgcaggaatacatcaataacctggatcaggatattgtaatctataccacctttgaggcgggcaacggagatactacgatcgaaaatgcgctgcaaaagatccaggctgcttccagccggatcagcatccagaacgtagacccgatcaagaacccctcgtttgcggagcagtttaactccgataaggcgacttctatcgctcgtggttctttgatcgtcaccaatcctgagaagacgcgctttaaggtgtattcgcaggatgatctgtacgagacaacgatcgactatcagacctatcagcaaaagacctccggccttcaggtcgagcagcgcatcatctcggcgctggtgtacatcaccaatgaggataccccgatgatctatctgctacaggggcatcaggaacccaagctttccaatctgactacgctgcgcaccagcctggaggataataactatcaggtggaagagctgaacctggcggaaagcgatgtggagctgaaaaaaggcgatacgctgatgatcgtttccccgcagatcgacctgagcgaggatgagcggctgaagatcgagaagttcatcgtaaacgagggcggacgcgtgatcatgttccgggatacggtgatcgatgcggcttcgctggagcggtttgactccatcgccgcgatgtttgatgtgacctttaataatgacctggtgggcgaagaagataccggcgcgtattataacagccccttctacctggtgccgacctatgggacgcatgagatcaccaacaagctctcgcgcgatggccgtccggcgatccttccggtaagcggcagcattaccctgtcggatatcgagcgtacggatatcgagacggaggtattcctgaccagctctgcgaattcatacgccaagactgacgttgccaatgaaaatatgacgactacccgggaggaaggtgacccgtccggcccgttcaatctgggtgttacctccaagcgcgtagacgccatgaacgacgataacagcgcttacttcgtaggatttgcatcctcgtccttcgtgcagtccggcgatttcctgtcgatgttcggcaaccaggatctggtgctcaactcgctgagctggatgcagacggaaaagggcagcgatattacgatctcctccaagtcgctgggaagcagcacgctgaatattacgacgcaggcgcagttgtacacgctgatggcggttagcattatcaccctgccggtgatcctgctggtgatcggcctgacggtttatctcagaaggaggcacctgtaatggcgcaagagacagccgtgaaaaaagagaaaaaaccgatgaccaaaaagacccgcaacctgatcatcatgctggttgtactggtgctcttggcgggggcgacggtggctgtagtgcttttgacccaggataatagcggccaaagcgaccagctgaccgagcagcagatcagcgatatggcaaaattgacgctggtggcagaaaaggaagaggacattgccagtatcaagaccaccagtgccaacggctctttggagttttattctcaaaaggatgacgagggcaaccgtacttggactataaagggcgcggaggatggcaagcttaactccagcagtatccaaagctttgtttctaccacgctgatcctgatgggtactgaggtggtagaggagaacccctctgaggaccggatggctgaatttggctttaacaacccttccgcctctgtgttgatcactaaaaatgatggcagcacgatcacctgcgaggtgggcaacgcttcgccagatagcgcctctatgtacatgatgcgcgagggacgcaacgccattttcctggtggataatgccacggccagcctgttttctgacaagctggaggattactgggatattcccggtaactatgtaaacgtcgagcagctgctcaagttccacgtgacccgtaaggatggcgataacctgatcatcgatttgggcgatgatgagatgctgggctattccaactgggtgatgagcgagccatactatgcctcgctggattcctaccagggcaaccagttcttctcgaacctgaccatgctggcgccgctgtacctgatcgataataagccggaggacctgactcaatatgggttggacgatccgcagatgaacctgtatatggaagattctgacgggcaggtatttgagttgaatatcggctctagcgatggcaatggcaacgtatacgtgcaggcgcctggtgacccggcggtatacgccatgctggaaagctcgctgacgacgctgaacgatctggatccgttccagctgattgcacggttcacgcagatttataacatcaacgttgtggataagattgaggcgacttcggcggatcgcagctttgagatcacgatggaccacgagaaagagatggacgagaacggtgaacccaagctggatggcaagggcaaggagatcctgcatgaaaatgccaagtccgatgggaaagacctgcaggaggccgggttccgcagcttctaccaaacgctggtgggcgtatcggtagatggtaagctggaggagggcgccgtggtggaaggtgacgtcgagatcacgttcaagttcaccatcaatgatggccacgtggagaccattgagtatattccttacggcgtgaaggattatgccgtccgcaagaatggcgcggataccgggctgtacattgagaaatggcgtgtacagcagctgtttgaagaatacgataagctgatgaacggcgaatacgacaagtaagcgctgtaaaagctaagggcctgccgcaactgcggcaggccctttatgctataatgatgaaaaggagtgaaaaaacgtgcctgatccgggtctatacgggcgtatttacgccctgtgcgcggcgataccacgcggcaaagtggcgacctatgggcagctggcgctgctatgcggccatccgcgcgccgcgcggctggtaggccaggcgatgcggcatgcgccggcaggcctgccctgtcaccgggtgatacgcgcggacggctccatggcgccaggtgatgcgtttggcggacaggggctgcaacaaaaaatgttggaagatgaaggcgttgtttttttggcaaacggccacgtagaccttgcaatcagccgatgggatggtaaaatctattcggtgccggcggagtgacgggctacatcgtgccgtgccaggacggctttataggcgctataggccctgacttgggatgggacctgaggcgcgggcgttatgtattgaggctctagtgcaggcatttcgttttgtgacgcatcctgcgtttgttcagtagtttttggagtgggggccgcggcgcttgttgccgcgatgcggtcccgcagggatagataggtgggcgtatcgcccggcgtgaaaaaaggcgtaaaaggaatcggcgaccgatcagcattgcgaatcattataaaggccctccttgcagttttattcaattaccaatatatgcgcatttaaatagaagtgtccgtatctttacagcatggtttttagatagtacaataagtatgttaacggtttataataattagcatatgcagcgaagggggagcacgatggggaaatatattgtggcgttagaccaggggacgactagttcccgggcgattgtattcgacgagctggggcagattgtcgcggtatccaaccgcgagtttgagcagatctacccgcagcccggctggatcgagcacgatccgatggatatcctcaacacccaggtggaggtgctgcgggaggtcatggtgcgcgcagggctcaatgcttctaacctctccggggtagggatcacgaatcaacgcgaaacgaccattatttgggacaaaaagaccggcgagccgatttataacgccatcgtgtggcagtgccgcaggacggcttctgagatcgagaagctggaaaaggacggcatggccggcaccatcaaggaaaagacgggcttgattttagacccatatttctctgggaccaagatcaaatggattctggaccatgtgccgggatcccgcgaacgggcagcccggggcgagctgatgttcggcacggtggatacctggctgatttggaacctgaccggcagccgtgcgcatgtgacggattattctaatgcttcgcgtacgatgctctataatattcacgatctctgctgggatgaagaattgctgcgcgcatttgatatccccatcgaattgatgccggaggtgttgccctccagcggcctgtttggggtgatgaataccagtattctgggtggcgaggtgccgatatttggcgttgcgggcgaccagcatgccgccttgttcgggcagacctgttttgaaccgggtatggctaaaaatacctacggcacaggctgtttcctgctgatgaacacgggtaccgagccggtaaacagcaaaaacaacctgttgaccaccatcgcctggggcattgggggacaggtggagtacgccctggagggtagtatctttatgggcggcgctacggtacagtggctgcgcgacgagatggggctgatcgaaaaatcctcggattccgaggaggtggcccgctcggtgccggatacggatggcgtggtgctggtgccggcctttacgggcctgggcgcaccccattgggatatgtacagccggggcatcattgtggggttgacccgcggagctggacgcgcacatatcgtgcgcgcggcgttggaagcgatcgcctatcagacaagggatgtgcttacggctatggaggctgattctggcattaagctgaacaccctgcgggtggatggcggcgccagtgccaatagcttcctgatgcagttccagtcggatattctaaacgttgcggtagagcggccgaaaattatcgagaccacggcgctgggcgcggcctgtctggccggattggcggccggcgtatggaaggatcgtgaagagctgaaggcgcgctatgcaatcagcgcgcattttgacccccaaatgccagagcaggaacgggaaggcaagtatcgcctgtggcagcgtgcggttaaacgatcgctgggatgggctgaacagtagaaataatggagatggcggcccgcagaatgtggcgggagccatctcctctttattatcaattttgcagttaaattctatatagttggcggcggccggtaactacccgtttcgacaagtgcagcggcagctcagttattttgctgattttacatctgagttgtaaaaaaatatagatacaatcgtaaatttatggcaaaaaaacagagaagtcgacaaaatacggccattgtactgcccaatatagtgtgatataattcacatgtggtcgaataaagcaggttatttccggaaaagcgatgtgtttttgcgactgaagagcaattctagatttgtgtcaaaagcaataaagttttcatttacaaacgaagaagttcttaagagggggatactttgaaatggctgatccagtcaaactacttgtagtggacgatgatgcggtgatccgcgggatgttcgtggactatttcggcgatttagagggttacgaactgtgcggtgaagcggcggacggactatcggcgctgggaatgatcgaggaatatcagccggatgtggtgatccttgatgttgtcctgtcgaaactggatgggattgaagtgctcaaaaaactgcgggctggcggctatggcaagatgcccaacgttattatgatctcttcgatggggattgagaacatcatccgccagaccatcgagttgggcgcgaagtactttatgatcaagcccgtggaaatgtcgctggtggaagagcgcatcagcgaaatgctcaacctgttcccaacccatacgccggtggcaaatacgcttgcggcgccggccgtccgcgagaaatcgctggatgagcagatcagcagcatttttctgattgttggcatcccggcgcatatcaaaggtttccattatctgcgcgaggcaattcgcctagtggtagaggaaccggacatgatcaatcgcattaccaaagaactgtacccgaggatcgcacaacattttgatacttcagccagtaaggtagagcgcgcgatccgccacgccatcgaggtggcatggagccgtggaaagattgaaaatattaatcaggtgttcggctacaacatctattctgaaaacgataaacccaccaacggagaatttattgcgctgatcgcggataagatcattcttgaactggcggcaagctgatgcatttatgccgataaaagggctgtacatcccggtgcaggggatgtacagctttttttgagggcggaaagccgactggcaaattatttataaaaaatgcgcttgacctggtttagtatagctgtgcttttgcatagaatgacacagaactgtggatttctagggaaggatatcaacagccggaaaagcgcatgttttcaaggggttggggataagctgtggataatgtggataattgtgtgcggttttttaagataaacccccaaggttatcttgagttatccacagattctacacaattttaagtttgaagcatatccgtcccttagaacccatagactgtaccagccgcattgacggggtacagatgggaggaaatgtttatggcattggagctgaaaaaggtaaatatccgcgctaaccggttgggagaggctgtgaactctcaagcgctggtggagggggaaattgcactagaagggggcgcggaagccatcgccaggatgctattcatttcggggcgcctggtggtgggcggtgtggaggcactgcaagacaaggtgaatatggagggaagcgtggtcttctcgctgctttatgtgggcgaacagagcggccaggtggagggcctggaggcggcttgtggcttcacccacagcgtagagcttgcggggcttaaggccggcggacaggtcttggtcagcggcagcgtacaggacgtgcaaagcgaagtggtggatggaaccgttatccgcgtgcgcgcgattgcagagctaaactgccagccgcaaacccagcagacctatgctgtggtttccgcggtagaggggttgcctgggctggaggtcaagcaggagcagttgacgccagggtggattttggggaccgcgaacgagaccacgacgctgcgggatgaggtgacgctgcccagccgcaacctacctatcggcaagctgcttaaatcctggggggatgccagcgtgacggaaatcaccgcgatggcgggggccgtgcggatgcgcggggatgtgcagctttccttgctgtaccgctgccaggacccggcagagcccttgcaggaggccgcgatgacgctgccctttgaatacgacctggcgctgccggacagctttatgggcctgcagaccgaggggcgtgccgacgtgcaggacctaaaagtgaccgcgcagttcgacgaggatggagagatgcgcgtgctgcaggtcgagtgcctgctgcagatgcgcgccaacgtctgggccacgcaggatctggaagtgctgcaggatgcttacgcgcccaaccaggatctggaagtgtccgagcagcagatcaccctgtcccgtccggcggtggaacagcaggcgacccaactgctcaaggagagcctgccgctgcccgaggggatgcccaatatcggccgcatcagctttttgcaggctaccccttgtattacggattgggcggtgaccgaccaggggctggaggtgcagggcatcttgacatgcggggtgctgtatgagagcgaccaggaagagggtggcatcgaagggttcaactccgaaacgccgttttctattgagctgacattgcctgagcggctggaaggcgaggttgacgtttcggcagcggtagatcaatcgtttgggaccgtactttcgcctacggagatggaaggccggtttaccctgcgctttaccgtggcctcgtatccggagacgcaggtgggggctgtggacaatatcgtccatcagggtcccagcagccagcagggcagcggcatcgtggtggcgttcgtccgcacgggcgatacgctgtggagcatcgccaggcgctacggcgtcagtttgcaaagcgtactcaagctcaacccgcagctggacccggagaacctgcagcccggcgacagggtgctgctctaccgccagttcgaaccgacggcgcctacggccagcgatgcggcccgctagagatgcccgaaagtacgcaacaggcccgccccatgaatgggtgcgggcctgtttgatttttaccgtccggctggatataatggggacaaaacccgatgcaaggaggagctggccatgctgcgcttaaaggcccgggcaaagatcaattgggcgctggacgtatgtgccctgcgagaggacggctaccacgaggtagatctgcttttacaatccgtagactttggcgatgaggtggaattggagcgcaaaccggcggggataagcttggcgtgcgacctgcccggcattccccgggacgtccgcaacctggcctggcgcgccgcagaattgatgcaaaggaccttttcgcgcgaagacggcgtggcgatcacgctgcataaggctgtgccggctcaggcgggcctggggggcggaagcggggacgcagcagcggtgatggtgggcctgcgcaaattgtgggacctggagatagaagatgaggcgttagagcaactggcggcgcaattgggggccgacgttccgtttatgatccgcggcgggctggcgcgggcgcgcggctttggcgagcggctggagcggctctgcacgccggagggctggccgatcctgatcgttaaaccgcgccaggggctgcctacagcggaggtcttccgcgcgtgggatcaaacggcgtatccgtatcacccggatatggacgggatcacgcgcgctttggtacagggggagcgaggcgaggtggcgcatctgatgggaaacagcctacaaaaggcggcgggcgccctctgcccggaggtggaggcggcctgcgaggcgcttcaaagcgcgggggcgctgggcagtgtgatgagcggcagcggctcggcggtattgggcctgtttgccgatgaggcggggctggacgccgcgcacgcggccctgtcgggccgctatcccatctgcatccgtacgcggagcgcgcgtgccagtatcgcctggttatagagggcttagcacccaagaatcaaggctgtagagttaaaatcgacccggtatgttttgcataccgggttttttgcaccataaatttcctatagacaggtttaggggcggcccgctttgtccatactatccctgtcggcaagggaagggagtggacaatatgttgaaacgatggatgacggtaggcctggtggtgatggtcatgatctgctgtggatttacggcgatgcgcgggacgcctgaacttgtaccgggtgtattgcgcctgcacattcgggccaatagtgacagcgtggaagaccagcggatcaagctgcaggtgcgagaccgcctgacgtcggaattttcgcatctgctggcccaggtacaggacgccgatcaagccgaggcggtgctacaggcgcagctgccccagatcgagcagacggcgcaggagaccctgcgcgcggcaggttttgattacggagtgcacgcggagatcgccgtgcagaccttccccgagcggcggtatggcgaaattatttatccggcgggggattaccgggcgttgaccctgtacctgggcacgggcggcggccacaactggtggtgcgtaatgtttccgccgctgtgctttgtagatgcgcagcaacaggaggagaaccagatcctggaattgactgaacaggcgccgccggtcacccttaaaagccatattgccgattggctgcgggaatggaaatggcccggctatacggaatcctgatctaataaagaaggagtgaagcatatgcacaaatggtaccacaagaacctgcccgcgatgctagcgatcgtgctggtcgtttgcctgtgcggcagcattgtcgcccaggcggcggccttgcgcgtgggcagccggggggatgcggtcatccagctgcaaaccaaattgcagcgatggggatattacgatggggcggtagacggcattttcggctccggcacgcagcgcgccgttatcgcctttcaaaagaaaaacgggttgacggcggacggcatcgtcggtacgcaaacggcacaggcgctggggatgaacctggacggcggaaccagcggcggtggcggaaccacgacgggcggcgggtccacgggtgggagcatcagcgttaacgccaacgaaaacgatatccaattgctggcccgggcggtctatggcgaggcacggggcgagccgtacgtgggcaaggtggcagtggcggcggtcattctcaaccgggtcaaatctcccagctttcctaacaccatctcaggggtgatctaccagccgctggcctttaccgccgtagcggatgggcagatcaatttgaccccggatgccgaagcgctgcgcgccgcgcgggatgcgctcaacggctgggacccttccaacggcgcgctctactactataaccccgccaaggcgaccagccagtggatctatacaagaccggtgaccggccagatcggcaaccacctgtttgcaatttagaagggaggcaccaaacttggacgaaaagaccaaccaggagatcaacctcaagggcagcttgcccgacgagccgccccgccggcggatgcgctggcccaaatggcactggaccgcggtgaccagcctggtactgttggtagcggtgtttgccctggggctatgggctgtgacggagaaccgcgcacacgcccgctaccaggcgcgcatggaggatatctacagtaaatcttttatggacctgatcgacgccatgggcaacctggaggtaaagctggccaaggccacggtagccatcacgccccaaagcgccaccactacgcttgcggatatctaccggcaggccaatatctcggaggagaacctgggccagctgcccgccaacctggggccgatggaagaggtgagcagctttgtcaaccaactgggggattactgccagatgctcagccgcaaggcggcggatggacaagctctcacccaggaggagcgcgaccagctgcgcaccctttgggagcagtgcaacggcatgaacggccagctgctggcgctgcagaaatcgctgcaacaggaacaggtgcgctggagcgaggtggcctttgcccccacgctggacgggcaggaggaatacggcgcggtagtggatggttttagccagctgcaaaacgaggccacggaataccctgccctgatctacgatggcccctttagcgattcgcgccagaaccgcgaacccaagggactgggggaaacgggcgtaagccaggaggaagcagcggacatcgcagcggagttcgtggcttatttgggggcgggcgagctgaccctaacggtggactcggatggacgcatcccctattatggctttgattttcagctggaagacgagcgcagcgggcatatcgccatcaccaaaatggggggcaagcccttgctgatgaataccacgcctacgcctcaggaggacccaaccgtggataccgagcgctgcaaggcggcggccgtgcagtttttggaggagaaaggctttggcgatatgcaggccacctatattcaggtttataacggcatggtggtggtcaactgtgcggcccagcaggacggcgtgaccctgtacccggatctggtgaaggtgcaggtctgctgtaatgatgggcaggtgctggggttggaggcgcagaattactggaccgagcatgtggaacgtgagcttcccgtgcctgagatcgtgcaggaggaggcgcaggataaggtggcgccctaccttacggtggagaccacgcgtctggcgttgatccctttagacgatggaagcgaacagctttgctgggagatcggcggccgggccagcggcaacgagtttatcgtctatatcaacgcccagacgggcgaggacgaaaatagttttctgatcttggattctgaggatgggcagatggtgctctaaggatgagcaaaacgcggggacggccggtcaggccgtccccttactaaaaactaaataaaaattatttccgaattatggtaaaataatacaacaggatacttaatcagaaagaggatgaatccatggccattcaagcttctttgaatgccgtatatttttcgacagcactgcggcagaaactcgaggatattgccggtgcaactgttaccacggtcatagcaccgatgggatatggaaaaactacggcaatatcggcattttataggcggcttaaggggaaggcgttgctctttcgcgagaacgttatagattgtggcaccagctcgttctggcagggtttctgttcagcttttcgcgcgcgaggagatttatcaaagaaattggatggtttaggactccccgtttccgcagtagagaaacgaatatttattgacttgatggttgacgaatttgaacagattggacaggaggcctatctgtttattgacgattttcacatggttaccgatgacaaggtgcgaggatttatctttttttggtgcagacagctgccggaaaatctgcatttgattatcagcagccgtggacgaatttttaccgaagctgaaagaattgctttaggcgccaatctaaatgaaattactgtacaacatttaaaattcggacgcgatgatgtggcgcgatatgcgcgggcgtgcggtattcgcttgacacaggcacagctagatcagctctataatgccagtgaagggtggatttcggcaatctatctcaaccttaatgcctacgcgggcagcgggcagctgttagccgaacaaaaaaatatctatcacatgattaaccaggtccttttcgagacattggatgaagaaacgcagtgctttttaactacgttgtgcattaccgatgcgtttactttagagcaggcgcgattgttgagcggtaatgcacaggcggaagatctgcttcagcgcgttttggatcataacgcctttattatccatttggctggaagcgacagctatcgtatacattatatgctgcgcgagtgtctttggcactatttccaaaagctacctgcgccaaaacaggagcaggtatgggaacgccagggagaatgggcagccagccagggccaatttgtagaggccatgcgcctgtttttaaagacgcgtaattaccggcgcttaatggaaatcgttgaggccgatgtaggacgtagcactacatatgaatatcgagaatttgtggcgcgttgcacccaggaaataccggagacgattctgttgcggtatccctttgggctgttggtgctgatgcgcaaattttttaactttcgtctgattccgcagatgatgcggatgagccaactttttttaattgccctgaagcaagcgcagctaccccaggaagaaaaagataatttgatgggtgaatatgagctgatccaaagctttttaaaatataatgatatcgaaaagatgagccagcaccaccgtaaagcggctgcgctgatgacgcggcctactcgtacgaccgatacgacttttacttggacatttggtgcgccttccattttggagatgtttcatcgcgagagcggtcatctggatgaagagctggtgcagatgcaaggagccctgccctattattataaagtaacgggaaaccatggatatggcgttgctaagttgatggaagcggaaatcgcttatatgcgggggcattttgaccaagcagagatctgtatgtgtcaggctaagcgccaggcccaagagtggaaccaatacggaatactgacagacgtattgctacttgaaatgcagctgctttttattaaaggagattgggagagtatcggctatactttattagaatatcgtacttttctggaggagcatagacaatatcttctactgcatacgtgggatatttgtacagcgcgggtagagttgcttaagggacagctggaatttgtgccggagtggatcgcacagggaaacttgcaagagagtgtcttatctcatccagcgctgcccatgctccatgttacttataatgaggtgctgctggcccggggagcgtatccggcgctgttggcacgaggagaagtgtgcgaaaagctgaatgccgtttatcctaactgcctatgtgaaattgaattgcaaatccagttggcaaaaggttatctggccctggatgagcgcgcacatgcgcaggtgcatttgcgtaaagcattggaccttgctctgcccgataggctttatatgcctttcgccacaggcaaaacacagttttttgatatgctgatggaactggcaccccaatatccggaagatgcgctggagcaaatcaatgcgttggcggcgcaggtaagggttgcccgtgaaaagggtagcacacaacagccgagccggctgcatgcttatggactaaccaagcgtgaaagagagattgcctacctggcggcacagcgacgaagtaataaggaaattgcgcaaacgctatatttaaccgaaaatacagttaagacccacttgaagcacgtatttgaaaagttgggcattcaggatgcgaggggaaataaaagaaggttgttagagcagttgatgaaatagccttcaccctgttggggtgatgacaggaagtattgtccactctatactcgatagagggtgggcactttgctgatgcggtatctacccttatctttaccttgtgtgagaaaggggatctagatgtgaaaagatggatgagagctgggataggttgcctttttgccattatgttaatggctggctgttcgccgcagggtacggtagctataccatcccaacagcccagtaaggctacccataccagtgcggatgagcaagtgggactaaacttggcgggcgcgcacgttgtattggataacctggaaagtgatgcaggagaagaccaattaaccgctcgggatgctgttgagaggatcgcgctatttgcagacccggaaggagattatgacctgacggtggataacgtgatttactactatgagtttgttgacgagatagacggcgcgcaatgctacgtgttttctttcggcccgggttctgaaacggattttgtggttacgcgacgttttgcagttaactgtgaaaacggggatgtctatgaagagaccagcagtggatggaatatgatctatggcgaaacgtcggaagaattaacggatgagaatggcctggttgcgctgagcaatgagaattatacggtcacctatacagaaatgcaggggtggcatgtgaacatagaagctttttctgatcctgagattctgatttgccttgaaaacgacacaaacgtcggtgatatcgtagttacaggggataagatacccgcaacgttatctctacaggactatgcacagatcaagctaacagagattaaggagttttatccgggtagcgacgtatcagaattatacgaaatggacggctataatggcgagccgtggcggtttactcgtatcgtgacgaatacaggagctgatctgcaggtttactttaccgtcaatggcaatatagctttgcagattgcatgctttaccagcgggccatactcggataatatgataaacgagtttgaaggggtatttttggataataactttgcattgatccaatactgaacatgattttgcacataaattaggcttggcaggggcggcggatatgccgcccctgcttttttgcgggcgcttctaaccagacacactgcttttttgtacagataatggtataatagcctatatcgataagctaaaggaggcgatgggatgcaaaggccggtgctgatcaagatcgtgggcacgcagacggagccgggcggacaggagcaggtgctggagctgacgacgctggggacctatagctgcgaagagggcatccatcagctggaatacgaggagaatgacgcgcaggaagggcagccggtaatcagttcgcagatgaaaatgatctttaacgccagtcaggtgcgcctctccaaaaagggcgcggccgaaggcgtgatggtctttgaacaggggaaaaagttcgtcagcatgcacgaaacgccgctggggcccatcgagatgggtatgctgccgctgcaggtaaaaagcagggtggagcaggattgtggcgaggtagagctgctctaccaaatggatatggagcagcaggtcatcagcctaaaccgcctgaagatatccttttcgccccgggagcaggcgccatgctcttagacgtggcggggcgggagcggactttacttgccaaagcgctgcaagaggcgctgccggactgcaaaccgtttttgactccgggccctttggggttgcggggttattcctgtgcctacgggctgcaacaggctggcgcgcaaagcgagcaggcgcaagggttcgcccaggagatcgtgcggcggatgactctgccacagggatggcagtgcagcgcgcaaaacggttatctcaactttgaagtaagcgcccaatggctggcccagctggcccgggaggcgtttgcggcctggccggaggcgccggatcggcccgtgccgctggaggacccgtgcttttggccggtttgccgggcgcggcggctaaggcggctggcgcaggcggctacggggaaaagcggagaaaatgagcctgcctgcctgtggcatgccctgcaactgccgcaagccctagccaagggaaagggacgggcgtggctgcagcggatgatgcggctgaccgaaccccttgcccggacgacgttggtagacgctacagggggcgggcgggatccgatcatttttgcgctggcgtcaaaagcgctggcgctggcgatagcacaagaaaaagatagggggaaggaaaagtgaagatcaattatattggacatgcgtgctttatgatgcataccaaggcaggtacccgaattttaatggatccgtacgacgcgtcggtgggctatcccgtccccaaggcgggcagcgtggcgacggattgtgtgacggccagccacgggcaccacgaccataatgcggtggagtggctagccaagccctacgagctgatcgacaaggcggggcgatatacggtaaaggacgtggtggtgacggctatcccctgctggcacgatgaggtgcaggggcaaaagcgcggacccaacctgatctttatctaccaggccgacggggtgcgcctttgccacctgggcgatctggggcatgaactggacgaggaaacccttgcggcgatcggcaaagtaaatgtattgctggcaccggtgggcgggtattataccctggagccggagcttatggcccgccaggtcagagcgctatcgccggaaatcgtgatccccatgcattacgcgacggaatttaccagcctgcccattgccgggccggagcggtttatcgccgagatcggcggggcggtggaactggagtgcagccagatggcgctgggcggcgaaacggccccgggcgtctatcttttgcagccggcctccaaatttttcgacagagcttgacaggatgccttgacagacgcggccggcaaaagctaaaatagacaagaatatgtgtatggagagggaggccgtttgggcatgagtaccaaatatatatttgtcaccggtggcgtggtttcgtcattgggcaagggcattacggcagcggcgttggggcggctgctcaagagcaggggactgaaggtagcgaatcagaagttggatccttacatcaatgtggaccctggcaaaatgagcccgttgcagcatggcgaggttttcgtgaccgatgacggtgccgaaacggacctggacctgggccattatgagcgctttacggatgagagcttgacgcgctcgtccagcgtgaccagcggtaaagtctactggcaggtgctcaaccgcgagcgccagggcgattttatgggcggcacggtgcaggttatccctcatatcaccaatgagatcaaggatattatcatgcgcgtgggcaaggaaaaggatatggacgtggtgatcaccgagatcggcggcaccgtgggcgatatcgaaggcctgccctttttagaggccatccggcagatgaagtgggaagtagggcaggaaaacgtgctctacatccacgtaacgctgctgccgtacctgaagatggccggcgagatcaagaccaaacccacgcagcactcggtcaaagagctgcgttccatcggcatccagccggatatactggtatgccgcacggagtacgcgatctcccagagcgtgaaagataagttggcgctgttctgcaacgtcaagcccggcgcggtggtgcagaatatcgacgcggccacgctttatcaagtgccccgcctgatgcaggaggagggcctggatagcctggtgtgcaagatgctgggcctcccggatgcgccggcggatatggacgactggtacgccatggtggatcgtttcctggcgctgaaggagaaggtgaccatcggcctggtgggcaaatatgtggatctgcacgacgcttacctttccgtggccgaggcgttgacccatgcgggtatcgccaaagatgtggcggtggatatcaaatggatcgattcgggcgagctgacgggggaaaacgttagtgcgcagctgaagggcctgcagggcatcatcgtgcccgccgcctttggcgagcgcggctcggaagggatgatccaggcggcgcactatgcccgggtcaacgggattccgtacttcggcatcggcatggggctgcaggcggcagctatcgagtttgcgcgcaatgtgctcttcctggaaggggcgaacagcacggagtttgacgagaatacggcccacccggtggtctattcgccggagggtgcggtggacgaggccggcctggccgattccatgcgcttgggtgcgtatgaatgccgcttggcatcgggcacgctgatcggcaagttgtatggcaccgataagatcagcgagcggcaccgcaaccgctacgagatcaataccgcctactgtgaagagttcaataaggccggctttatcccggtggggatcgagcccaagacctgcatggtggaggccatggagctggagggacatcccttctacatcggtgtgctgttccagccggagtttaaaagccgccccaaccgggcgcatcccctgtttgccggtttcgtagaggccgctaaggcgaaaaaggcataaatatcattattcaaaataaaagccctgctttggaagattccagagcagggcttttcgcatggactagggcagatttttaaagaagcgcgctacctgccggtcgtttttgaggattacgaccttgggggcgtattgctctacgatctgccggtagtgagcgcgtttttcacgagtgcgccccgcccacaggatccaccgggcaaaggcccaatcaaacttttctacacatccgggggcgcaactctcccgtgcgcggcctttatggcggtaatagcgcttaagcgcgcgaaagaaacagcggacccgggcataattcatccaaatgatacagtcggcctgctgtaaacgctgaagctgataaaagtgcgcatagttgccgtcgatcacccagctgctgttttgcataaagcgcgccactatctcccggcccttttcggggtctcgctccacccatcccggttcaaaattgaccatatccagatagagcagggggcactggtagtgatcggacagagctttggccagggtggattttccggcgccgctgtaacccatgaccgcgatcttcatggcaatatcctctattcataagatttttagggagctttagtgtaccatatacggcggccctcttcaatgccgtgtggattataaaaggtctaagtatatatggttttgcatagcgtatagagtagaaaagcgcatggagggggagggcgaaatggtcaattatctctggattgggatggtgctgtgcgcgctggtggcgggcgcggtaaacggcacattgcccgccgtaggtcaggccgccatggatgcggccagccaggcggtgaccctctcgatcggcctggccggcggatatgccctgtggctggggctgatgcgggtggccgatgcagcggggctgcaaaaggggctgggcgagctgctaaaaaagcccatcgcctggctgtttcccgaggcgcgaagcgccaaaagccgggaggctatctccatgaacttaacggccaatatgctgggcctggggaacgcggcgacgcccttgggccttgaggctatgcgggagctggaggcctgcagcccgatgaagaaaagggcgacgaatgccatgtgtatgttgctggtgatcaacgcctcttcgatccagttagtgcccaccagcctgatcgccttgcgtcagagcgcgggctcggccaacccggcggagatcgtgctgccggcgctgctggccaccaccgtttccacggcggtagggattttggcggccaagctgatgcaaaggtgggtttgaccatgcagctcttacaatccgcgggcgatctggtcatcccggtcatcatcgcgctgatcgtgctgtttgccgcgctgcgcggcgtacagggatacgatgtgtttgtgcagggcgcgcgccagggcttaggcacggcgctgcgggtgctcccttttttaacggcaatgctggtagcagtagcgatgttgcgtgccagcggcgcgctgggcgcgctggaaaacgcgctggctgctccgctggccgccgtcggcatgcccaaagaactgctgggattaacgctgatccgcccgctatcgggctctgcggcgttgggcgtgatttcggagctgtttaccgcgtacgggccggattccatgatcggtcggatggcctcagtcatgatgggctctacggaaacggtgttttataccgtagcgctttatttcggcgtagtgggggtgcataagactcgttataccatcccggcggcgctgctggccatgctggcgggcacggtggcggccatcggtatctgcaacctgatgtggggcggatgacgtggggcgccgcttatggtataatcccttttgaaggaagggatcaatatgccaaagtgtgcggtgttttcgattattgatgaagcgcggccggagcggctgcgcgatcattttgtgctggtgatcgatgttttgcgggcgaccagcgtgatggtaacggcgctggacaacggcgcggcgcgggtctacccggtggagacggtggagcaggcctttgcaaagcgcgagtgccatcccggcgcgctgctgtgcggggagcgcaaggcggtaaagatcgaggggtttgacctgagcaattccccatctgaatatacgccccaggctgtggcgggaagagaattgatcatgaccacttccaacggaactcgcgcgattttgcgggcggtgcaggggggtaaaacggtggggctggcctgttttcgcaacgcgctggcggcttgccgggtagccgccgcatccgggctggatgtggcgatcctgtgcgcgggcaccaacgataagtattccatggacgatgtgctctgcgccggggcgctggtacaccggctgtgtgcgctgggcgattttgagctggacgatctggcgaaccatgcgctggtactctatcgcctggggaaggacgatattaaaggcgcgctttcacagtgtttgcatgtgggccgggtgatcgccgcaggcttcgcagcggaccttgattattgctatgcccaggacgtggtacagaccctgccactttggcgggatggggccatcaccaccttgacagaagcgaaataaggtatataatagttttaattggaaatagtagacctgtagcgatgatgggaagagtaaccgtttttatcccttttaaaagagagccggggtgggtgaaagccggcaaagggcgggcggcgaacatggccccggagcttctggcgccgaaagggattcttaggcggcagcgggcgcgcccgatacagcgcgcggatggtgttagccgtccggctttgaggccgtcgtaatggcggcaaaataagggtggtaccgcgggcattcccgccccttcatgggggtggggtgccttttttattatccaaaagaaaagatagaaagagaggattttcctcatggcagacaaaaaaactttttatgtgaccacgcccatctattaccccagcgataacctacacatcggccatgcctactgctctgtggcggcggatacgctggcccgctttaaaaagctgacgggttacgacgtctatttcctcaccgggacggatgagcacgggcaaaagatcgagcgccgggccaaggaggccggggtcacgccccaggcgtttgtggacaagattgtggccggtgtcaaagagctgtggaagctgatggatgtggactacaatgactttatcagaaccacggacgaacggcacgtaaaagccgtgcagaagatctttaaacagctttacgaccagggcgatatctataaggccgagtacgaaggctggtattgcacgccctgcgaatccttctggacggagatccaggccaaggacggcgtgtgcccggattgcggccggccggtggagcgcatgcgggaggagagctatttcttcaagctctccaagtatcaggattggctgatcgattacatcgagaagaacccggagttcatccagccggtgacccgcaccaacgagatgctcaataacttcctgcggccagggctggaggatctgtgcgtgtcgcgtacctccatcaagtggggtatcccggtcacctttgacccggggcatacggtctacgtatggctggatgcgctaagcaactacattaccgccctgggctatggcagtgaggacgacagcctgtaccaaaagtactggccggccgatgtgcacctggtgggcaaggagatcgtgcgcttccatactatcatttggccgatcatgctcaaggccctgggcctgccactgcccaagcaggtgttcggccacggctggctggtctttggcgggggcaagatgtctaaatccaagggcaatgtggtggacccggtggtgctatgccagcgctattcgccggacgccatccgttatttcctgatgcgggaaatgccctttggcgcggacggcgaattttccaacgaagcactggtaggccgcatcaacgcggacctggccaacgacctgggcaatctggtcagccgtacggtagccatggtggagaagtattttgacggcgtggtgcctgcgcccggcccgctgactgcggaggataaggaactgcgcgccaaggccgaggccctgcccggtagtatggaaaaacagatggatgcgctgcaattcagcgttgcactgtccgagcttttcaagttcgtcagcgattgcaataagtacatagacgtgaccgaaccttgggtattggcgcgcaccgaggaaggaaaggagcgcctgaagggcgtgctctaccacctggtagaagccatccgctatatcgcgattctggtttctccggtgatggtgcatgtgcccgagaagatttacgcgcagatcggcctggaggatgaggcgctcaagacctgggacagtctgaaggcctttggacagttcccggcgggggccaaggtatgcaagggcgaggcgttattcccgcggctggacgttaaaaaggaactggaggcgctgatgccggctaagccggaaccggtggctaagccacagcccgaggcggaggaaaaacctgcgcccgcgcagatcaagatcgacgactttgccaaagtgcagctgaaggtcgcccgggtgctgagctgcgaggcggtggaaggctctaacaaattgttgaagtttagcctggacttgggcggggaaacccgcacggtggtctccggaatcgccaaatactataagccggaggaactggtgggcaaaaatctgattttggtggccaacttaaagccggccaagctcaagggcatcctgtccgagggcatgctgctctcggccgaggggccggacggcagcttgaaagtgctgacggtggacggggagatgacccccggttccgaggtgggctaaatgcttctgttcgatagccatgcccatctggacgacagccgttttgatgaggaccgggaggcgctgatcgcccacctgcaggcgggcggcgtagcccgggtggccaacgcggcctccgaccttgagacttcccgcgcggctattgccctggcggagcaatacgattttatctacgctatggctggggtgcatccccatgaggcggcgcaggcgccggtcaactacctagagcagctgcgcacactgctgacccaccccaaggtggtggcgctgggcgaaatcgggttggattatcattatgacctgagcccgcgggatgtgcagcgtgaaaagatggctgagcagatggcgctggccgtccaactggacaaaccggtgagctttcatctaagagatgcttggggagacgctatggatatgctccgcgcgcacaagggacatttgccccggggcgtgatgcactgcttttccggcagctgggagacggccaaagcctgcctggatatgggcttttacatctcctttgcgggtccggtgacctttaaaaatgccgacaggctgcgggaagtggctgcgcaggtgccatctgaccggctactgatcgaaacggacagcccttatatggcgcccgaaccccaccggggcaagcggaaccagccggattttgtggccgaggtcgcttcgcgcctggccgcggtgcgcggcgtggggccggaccggctggctgaggattgctatgagaacgcctgccgtctatttgggctttgaggcgtgacgcgaaagataagatgcactataatggagaaaagagcggccggtccgcaaagaatgaggggatattatgcagacagtggtttatgatctggacggagccctgtatatcaacctgaccaaccggtgtgattgcgcttgcagcttttgcgtgcgacgggaccataacggggtgggagaccattatctgtggctggatcacgatccttccacggaagaggtgatggctgcgcttggacaggtgaatctggaagattaccgcgaggtggttttttgcggctttggcgagcctacctatcgcttagagcagctcaaaaccgtgggcgcctggctgaaagcccagggcaagcgggtacggttgaataccaatggccatggggacttgatcaacaacaggaggatcgccccggagttggtgggcgcggtggatgtgatctcggtcagcctgaatatggacaatgccaaagattatcagatgacggtaaatagccgatatggcgagctggcctttgacgcgatgctatcctttgccaaagattgcgctaaacaggggatcgatacctgtttgagcgtggtggacgtcattggcgaagggcgggtggcgaattgccggaaattggcggccaaggtgggcctgccgctgcgggtgcgcgcctatatcccgccggaaacgccggaacacgccagcggcacgcatggcaaagaataactgaaacgctgcttgcccattagaagcagggcaaagcttgaaggagagatgaaattttgaagatcgagacgcagtgcctgcatgcaggctatcaagcggagaacggacagcctcaggcgctgcccatctaccagagtaccacttaccgctatgcctctaccgagcatgtggggcagttgtttgacctgacggtgcccgggcacatgtatacgcgcatctccaaccccaccgtcgaggcggtggaaaataagatcgccgcgctggaaggcggcgtaggggcgctttgcacctcctccgggcaggcggccagcctgctggcgctgctgaatattctggaggcgggcgatcactttgtcagcacctccaccatctacggcggaacggtcaacctgtttgcggtgaccatgaaaaagatgggcattgaggtcaccttcgtcaatgccgacgacgatgaggagaagatcgcccaggccttccgtaccaacacaaaggcggttttcggcgagaccatcgccaacccggccatcgcggtactggatatcgaaaagatggcgcgcatcgcccatcaatttggcgtgccgctgatcgtagataatacctttgctacgcccattttgtgccgcccctttgagtttggggcggatatcgtcacccactccaccaccaagtacatggacggccatgctgtgcaggtgggcggcgtgatcgtggatagcggcaattttgactgggagaacggcaagtacccggggctgacccagccggatgaatcctaccatggggtgacctataccaaggattttggaaaggcggcgtatatcaccaaggcccgtgtgcagctgatgcgggacttaggcacctgccagagcgcgcagggagcttttttgatcaacctgggcctggagaccctgcacctgcgcatggagcgccatagccacaatgccgacgccgtggcccgctttttagccgggcacgagaaggtggaagctgtaaactatcccacgctgccgggcaacccctacaaggccctggcggagaaatacctgcccaaagggtgcagcggggtaatcgccttttccatcaagggcggccgcgaggcggcggtgcgctttatcgatagcctgaaactggcctctttggtagtacatgtagccgatgtacgcaccagcgtattgcatccggccagctctacccaccgacagctgactgaccaacagttgatcgacggcggcatcaccccggggctgatccgtttgtctgttgggattgaaaatgtggaagacatcattgaggatgtgcgccaggcgctggaaaacgcataagggaatagttagggtaaataaaagcctgcgcactttttcggcgcaggctttttattataatgtgctaccagacctcttcatgcaccctatctgccaggtaacgatcgttgggttgcctgctctcggccgggttgcctaccgcaataatgcagaaggggacgatgtttttcggcaattttaggattagagaaagcgcatccacccgctcttgcatgggatagatacccagccaaacagcgcccagcccctgcgcttgggcggccagcaggatattttgcgccgcggcaccgcaatccccggggaagtagccaggggccttttcacggtccagatccgccaggatgacgatgccaagatccgcgcccagcagtggacggccgttgggatggaccttcacaatggcctcccgggccgccggatcccgcatgatgacaaagtgccagcactgggtgttggcggcggtgggggcgcacatggcggctttcagcagttggtgcagctgctcatccgtcacgggtttatcggtaaatttgcggatcgatcgccgcgcgtacaggttttctaaagattggttcatctgtagccctccctcagttcttttggccgccaaaatgttgccagtggataaccgcctcgtcatactgggtacggggttccggcttctctaccgggtagccgatgtagaccacgcccagcggaaccagcgtatcgggcaggcccagcgtcttttgtacagccgggtattgggcggaattgggatagctgcccagccataccgttcccaggtccagccccacggcggcgatgaggatgttctgcagcgcggccgagcagtcctcgatccagaatccacccttttcgccctcctgggttttggacatatccccgcagaccacgatggcggcgggcgcattgtacttgccaaacagcatagtatcccgcagggcgttcatgctttcgggctgatcgaccacgacaaaggcccagggcttagaattgcgggcggaaggtgcggccatggcggccttgagcagcagctccagtttttcccgctccacgggcctatcttgataactgcggacgctgcggcggttaaagattacggataaacggttgccctgatgaaattcctgcatgctaattcctccccttatggttgatttgtgtatgatgaagatatccagtattcccatattcattatagcatggttgtcaacaggaaaaagggggagaatggggcgcagggcaaaagtgatccaatattttcttgaaagggtgatatttgatgcaggtcagaaggttccgcacggaggacgcaaaggccgtatcggcgctggttcgccgcaattttatggaggtcaatatccgggattatccgctttgcgagatgcaggctctgtctgatgcgtacagcccggacaagatattggagatcgccaaccaggcgcatacctatgtcgttacggatgaaggggagcggatcgtggggacgggctccatcacgagctactggggcagccagaccgagagcatcctgctgaccattttcgtgctgccagagtaccatggaagaggcgtcggccgcagcatcatccaggcattggagggcgacgaactttttttgcgcgcccaccgcgttgagattccggcgtccatcacggcttgccgattttatgagaagatgggttacagttataagggtggcgtcaagaagctagatgcagaggggttgtaccgtatggagaaatttcgatgacaaggtttgacaagtccgttccgcaccgttaccatggtgataataaggcagcgcggcggtaggataacggggcgaaaaggcctgcatgttgctgtaatatttgctacataaccgcgcttggtttaagtatggagagaatagattgaaagggaggatatattgcaatatggatgaaaagccgaaaatcaaactgtacgcccttacggtggattgtaaggagccttatgctttggcgcaattttatgcggcactgctgggatgggagatacccttttacgatgaggattgggcttgcgtgggggcgccgggggcggcgcagggggcctaccccggcattacgttccagcgcaatccggactatcagccgcccgtatggccggagcagcccggtgcgcagcaacagatggcccatctggactttgccgttaatgatttggaaaaagcggttgcgcacaccattgcgtgcggcgcgacggtggcggccgagcagttttctaatgactggcgggtaatgttggacccggccgggcaccctttttgcctgtgccagatgaaagcgatgatgggaagcagccagtttgccctgctttaagccggtaaggacaattagaaaaacggcttgctataacacgaaaagcggagagctccttttggagcctccgctttttgtctacgaaggaaaatatcacccgctctgagtcatgtttaatcggcgccataaaacgcccgggtcagccgtgcaaaatcctgcaaggatagtgcctcggccctgacggcgggcgatagcccacaggcttcgatcttttcgcgcacctgatctcgcgagagaccaaaatttgaagcggccaggttgttgtgcagcgttttgcggcgcatggcaaaagccgcgcgtaccaggtggaaaaattcatcttcatccaccggaccgacgggacattccggcagttttgttagcgtaataactgcggagcccaccttggggcggggcataaaggcggaaggtggcaccataaattgcaactcagcccggcaataaaactgcacggctaccgatagcagcccgtaatccttgctgccgggcgcggcgctcatccggtcggcaacctctttttgtatcatcagcgtcatgctttgcagcggcaggccgctttgcagtatgcccataatgacgggggaggtaatgtaatagggcaggtttgccaccacgctaaagggctgcccctccaaatgctcttgccacagtgcaggcagatcgaccttgagaatatcccccagcaccacactcgcatggtcatacccggccagcgtatcgcttaaaatggggatcaaccgccggtcgatctccacggcggtaacgaatgcgccgcgctgggccatggcctgggtcagcaccccgataccagggcctacctccagtacccggtcccctgggccgatggcagaggcatccacgattttttgaaggatgttttcgtcgatcagaaaattctgccccagagatttggtgaagctcgccccgtggcgggccatcagctcctgtacgacggtagggctggtcaatctattcatgcgtttgctccttatccttaaaaaaggagtttaagccgagcaaatttctttgctggttaaaccccttttgcgcgcttctatattattctaacagagaaggccctattttaaaatataaatttttaccgagcggataccccaagagcggcactcggcctctgtattcatgaagagatccacggtgttgccgctgataaatgagccgcccgtatcctgcgccacgccaaacccataacccgggatgtaaagccgcgtcccaagcgggatcacgcttggatccacggccaccgtacctaccgagggcataacaccggaagccgtaggcctgcccgtatgggtgtaagccgtggctctgccggataagacggaggaataggcatagttctttccgccgatggttaaaaccgcctcactgctggaggagccgccgctcgagctggagctactgccagaggaagaggtcttattcccactgctggatgaagtacctttgctggtggaggacgatgtatttttggccgtcgttttaccgctggaactctcggttttagaagtacttttctggctgacattgctggaagccacctgttgcggcgcaccggtcccctgcaagatcacacggttttgcgccttttgcaccatggaggccacctgctcgcgctctacctcctggccgttgcgcaaggtgatctctatctcgcgcatcacttcgccctctttgccggagaaagccaccttttcggtgccgatctccagtgaatcggtcttttcgataacagtatcaaagggtagcgtttcgtaaaggacctcccgctttttttccacgcgggcgacctcgatctgcatgccggggtagatgctgttttcaagcgccggctcgacttcgtcatattcgcccagcgtgatgccggccagctgcagcgcatcctgtaccgtgccctccaggatcttaacctggcgcacatctccatccacccgtaccagaaggttggaggcgttttgcacggtaacgcgcatgttggcgtaaaccggcgtttccaagggcggctccaccttgtccgcctcgccaagggtaataccgtattgctccagtaactggcccacgttctcgctctgggtctgaatctggcggcgttcgttgccgatatccagcgtgacgacgcagcgctgcgcgcttttaacacaccataggatccccaggctcaaaaaaagtacggcgatgacgcccagaccgatccgcaggctattcgggctgcaaagggtctgcacatcgctccaaaactggctccacgcagtttgtccaaatgaaccatcgcgcacccgcgcccggcgagagtggctgattttgccccactgcccagtgcgcctgcgcgtccggtattgatccgcatgcctttgtaagggggtcaacaattgctgagcccgttcggcggcgcgcgtccccaaccgttcctgttcattggtcagatccagccgggtgccagtgccaaaggcataacgtttcaagctgcgcatgttttcacctgccttgtcccactttaagatttagcgtatcgctattttatatgagtaaatttcgtttgtcaaacaaatcctttggcgcaaataccatttttgcctaaaaaaagggtgaaattcggatattttcccccacttttttataaaaaatatgggatagaggctattgctggaaaatactatatgttcggtctcaaactttacacccataccatataagcgtataatatatctaatcgcggcgcgaaaactgtcgaagcctgaaatattacgattctgtaataaaaatactacttttagtagcagcccaaagaaactaaataatcaggttttgcaggtgaaaacggtgtattttacaggctgtaatagcggagtggccgggattcttacattatatataaagggatatgggaatatcgcgctaaggcagcgcttaactgggcccatagtagaaaaggagagacttatgcacaagcggatgggcgcattggccatcagttttatacttttatgccagctattattgttatcaggctgcgggataggcgcgcaggaggctgaacaggcagcagcgcagcggtaccaccaactgtgggccaagcgggattaccagggcatgtacgatatgctcgacaccgtgacccagcgcagcgtgacgtttgaggattttgagcaggcgcaccggaagatctacgaccccatcggggtagaggcgatcgccgctgaaatggtgggggagatgcgcaagagcgagaccagagcatatgaaaagttcaaattgacctatacagctggcgattatggcgaggtcagctatgatatggagctagcgctggtcaagcaaaatggcgagtggaaggtgcaatgggattatagcctggtgctgcccggcatggaggcggacgacgagctgcgcactgtgaccacccagggcaagcgcggcgagatattcaccagtgatggagaactgctggcgcaaaacggctatgcttcaacggtctatgtcctgccggacaaagtggaggacgagacggcgctggtttcctccttaagcgcggcgctggagatggaggccgaaaagattacggagattttaaacagcaaggaaacccagcgggatggcttggcgatcatcaaggcctacccttatggaaagatgagcgacgagctgcgcacacagctaggcgaaatcgcgggcgtggggattgacgagaagatgtacaccccccagcgcatctacccccatggggatatgttggcccatgtgatcggctatatgggcgtggcctctgaggaggagttggcaaagttggaccccgagatttatggcgccgacgagcgcatcggcaagaccggactggaagcggcctatgaatcccagctgcgcggtaaaaacggcaaggaagtgcggctttacagctccgatggccggctaaaaatgaccgtatgcaaagttgccgccgaggatgggctggatctgatcctcaatattaactataagttgcaaagccgggcggaaaaactgctaaaagagaatattgacgagggaaacagcggcgcggtggtggtgttgaaccccaaaaccggcgcagtggaggcgctggccagctacccgacctttgacttaaacctctttgcgctcggtatcgatcaggcgacttgggaccagctgaacgatgaaaacggcaaccagcccctgttcagccgggcatttcagggactatatgcgccgggttccaccattaagccctttacagccgccattgggatggagagcggcgccattaccaaggactacgtgtttaccggcaatatcgtaaaccgcaggtggaagcctaacgatccttcctggatctacccgcccattacgcgctattctgattacgcgcagccctacaatatggaaaattcgatgatgcactcggataatatctattatgcggatgtagcgatgaaggtgggttcggatggatttaccgaatacctgaaaaagatcggctttggagaaaggatgccctttgaccttagcgttggcaaggcgcagatctccaactccggcgagatggagaacgaaaagtttttggcggactgtgggtatggccagggcgagatgctgatcaccccgctgcagctgaacgtgctgttctcctgctttgccaatggcggcacggcgatgaagccgttcctggtcaaagagacccggcggatggaggataaggactatgtgctggtatccagcaccgaaccggaggtctatctggaaaatatcgtttctgaggcatcgatggaggtgctgcagcccattttgcgcaaggttgtgaccagcggcacgggcatctcctgcgccccggcgggcatgggcgtatcgggcaagacgggtacggcggaggtcggcacgctaaagaagcacgagatcaactggtttaccggttatgtatcggacggcagctttgaccgggcggtgtgcgtgatgatcgacgcgatcgacggcaatacgacgagtaaatcggtgattgcacaaaacatgtttttgccgtaagatagtaggcagtgagatggaaaggccgagggggtaaagtatggcagagcagaggggccccaaaccgagcaaggcgattacggattactgtgagaaacatgcgcggcccgaaaaattgcgcttggatgaggaaacggtaaaaaaggataaaagcggcgtattgctggcgctgaagcgggcaaaggtgctgctggcggcgtctacggcggtgatgctgatcgccgcgggcgtgatcatctattttgtgacggtatattccccgttggagggaaccagccggggcgcttacttccgggggatgggcgtggtggatcagctgagcgacccggaaaaacgggaagagatgcaggaagaattggatgccgctgttgccgcgtccggcgcgcagacggtgcaggagatttatgcgcaggcacaggattgtttccccgaactgatggaaaaaatggataacatcgctggagataacgccggcccgggcgaccaaaagatggagcaggccgtaaggacatattggggcctggtacgagatcagatgatagggagagcgatggatgtagagtctgctgtctatgagtgggtttttgaaaattacgtgccaccaggaggtgaaacggcaaatacggtcgacgaggctatccagatcgtccaaaagagattgaagagtgcacggcggcaacgggatctagaggacgtgatcagttgggataaggggctgggtgatcttacagaagattggcattactagttattttggccggggggttttcaatccgacggaaatgtgctatactaacatacgcaatcgaaaaatgcgcttgtagctcagtggatagagtgttcgactccgactcgaaaggccgtgggttcgaatcccgccaggcgcaccaaaaagcccaacaccgcgcgaaagcgcagtgatgggctttttaattatcggtgggattcgaacccaggtgggttcaagcgagcgggagcccggacgaagcgcgaggtatcccgccaggcgcaccaaaaagcccaacaccgcgcgaaagcgcagtgatgggctttttattatcggtgggattcgaacccaggtgggttcaagcgagcgggagcccggaggggcgaagcgcgaggtatcccgccaggcgcaccaaaaagcccaacaccgcgcgaaagcgcagtgatggactttttattatcggtgggattcgaacccaggtgggttcaagcgagtgcgagcccggaagagcgaagcacgagatatcccgccaggcgcaccacgtcggagcggactgtatatcgttcgctacgacttttttattaaaaagtcatctctcactcattctatcgctcctccttttccaaaacaggtcacgttcgcatcgcctgttcgcttgtaaacgcgctcacgacggctttggcccactgccaccttgggcgtttaatctccaccagtaaggcataaggagtatcttttatattatagaactaccgttaatggataggcatgccacaaaccttgcacaaaagttattggtgtatggggcctgggtgcaagctgcacgcaaaaatcggccaaatgcccaggtttggcggttggttttaaactgtgctataataaagccaatctggcaatgcgcggcctgtgtactggcaacgtgcgtttgccgccgaagggtatgccatggcgatcaataaatttatgcgccttgccctcaaggtgctctcttatccggatatcgacatccgcaaaacctatccgctggagcggtctatccgctatttgcggccgccggcgctgctgccgaaaaaccgctggcgggatcatatgatcctctcagacggaagagagatcctgacgcggatctatagcccgatggacgatgcgggaatggataccctgctttttttccacggaggcggttgggtaaccgagagtattgatacgtataataaggtgtgctatgctcttgcatgcgctacgcgcagctgcgtagtatcggtagaataccgtttggcgccggagtatccctttccccaggggctggaggactgttacgccgccgcgcgggagctgatcctcaggcccgccggatttggctttaaggcggcgggacgggtgacgctgatcggcgacagcgcgggcggtaatctggccgcggcggtatcgctgatggccagggatcagggcgagttttgcataccgcgccagattttgatctatccggcgacggcagccgaccatagcgcagcttcgccttatccgtcgatacgggaaaatggcagcgactatctgctgacggccaagcgaatctgcgaatacatcgacctgtataagcgaagcgaccaggaccttcaaaacccttattttgcaccattgctggcgcaggattttgcaaaccagccggataccttggtcattacagccgagtacgacccgctgcgggacgagggggaggcctatgccaggcagctgcgcgatgcaggcaaccgcgtaacggtttaccgcatgaaggatgctctgcatggctttatgggcctgggcacaggatacgtacatgtgcgccgcgcacatgcgctgatcaattcatttttaagtgggagggatcgggatgaatcagccgggcagctggcttaaactggataatgccggcaagatcttccccgctaccagcagcccgcgggtgacgggcgtattccgcttcagctgtgagttgaacgagaacgtgcagcaagcgccgcttcaacgggcattggaaaagacgctggagcgcttcccacattttttatacatcatgcgcaacgggcttttttggtattatttggaggccagcgacctgagccctgaggtgcatgcggaaaataccggcgtatgcgcacagcttttttaccgaaaccgccggcacctgttgtttgatgtgagcttctaccataaccgcattaatctggaggtttatcacgccttgaccgacggcacgggtgcgatgcagtttctcaattatctgatttgctgctatcttattcaaatgcaccccagccagatcagcgctgaacttttggatggactggccccggccccgacctcttcccgcgaggaggacagctttaagaaatattaccgccgcatcaaaaaggaaagtagcggcctgccacgccgcgcctaccggctgaccggcacgcacggcgagatgcttcgggtgacagaggggcttatgccctgccgggcagtattagcgctggcaaaggcccaccatacctcgctgacggtctttctatgtgcattgatgatgctgtccatccaccgggagatgatgctatataatgaaaaaaagccggtggtgataacggtaccggtcaatctgcggcagtacttcccctcagagaccagccgtaatttctttggaaatattcgggtcgcttatcagttcaaagatggggaagaggatttggatgagatcctcgcatcgctcaaggcggccttccagcgggagctgacgcaggagcgattgcgcggcaggatcagcagctatatggccgtagaacgcaatccatttgcaaagattgcgccgctaagctttaaaaacctttgcctgcgtattgcccgcagggtctctgatggcggggagacgatggtggtatccaacatcggcagggtcacgctgccagaggccctggaaccctttgtgcaaagtatgacggtgctggccagcactgctaaactgcaggcctgcatttgtacttgcggggatgtgctgtccattggctttagctcccgctatgcggagactgatgtgcagcgcaattttttcaggatgctttcagaaatggggatcaagatcgaagtgaagagcaatgctcccgactagagaggaaaatacaatgctttactgtaaatcatgccgcgttagcgtggcgggcaaccgcagatactgcccgctttgcggaggcggccttacgggcgacggggaggaacatacggattatccgattttgccccaggatcaaagccacagcaaaaggctgatccaaatcatttcaggcgccgcgctgtcggccgcgatcatctgcgtcgccatcaacctgttggtgccggccaagatctggtggtcgctattcgccgcgctgggattggggtgcgggtggctgtgggccgttgtgggcatcgttaagaaggcgaagctgctgaacaatatcgtgtggcagctggtgctgatctccgctgtggcacttttatgggacggattgacgggatggcgaggctggtcattggattacgttttcccttgtgtgtgcacgggggctatgctggcggtgatcatcctctcccgagtgcggcatatgccggaccgggactatattatcagcctgatcctgtgcgcggtaatgggcgtcatccccttgatttttctgttcaccggggtgttgagtgtcgccattccgtcggtgatctgcgcggctgccagcctgatcgtgatcctatcgcagatgatttttaattggaaggccatgtaccgtgagatccataaaaaattgcatttgtgatgagtagaacctccctttaaaggtgattgagcctaaaagggaggcttttttattgacgagcggataccctgttatatataggtagaaaccactgctgactatgatgtatcaggaaaaatgcgctgatgctgaggcagatctaaaatggacatgaagagaaaaattggtaaaaaaggctatagggttgtgcgtcacatatttatgctatatacttgaaatagtcaaatttgtgacggaaatataaaacctttgaccgtattttgcggtgccttgcagtgatgcccgcaaccgtggcgatctcactgaacaagaaatggggggagcatgttgcttaaagatatccaaccgctgcagatcaaaatgtttgaaaagtttacggttagcaatgagcactttgaatatccaacgggcaagaagaaaaacaagcagttgagtacgctggtagcctatctgctggctaaccgcaatattgaggtttccagggaaaagctgtttgaaacgctgtgggcggaagagaacagcaaccccggcggcgcactgcgcaacctggtctaccgtgcgcggcaggcttttgccccgttctttccccagcagaaggtggactgcattttgcttaaaggcaatacctatgcctggaatccggagatcccctgtgtccttgacatcgacgtatttgacgattattatcgcaaggccggggcggctaaggatgcagatgaaaagtatgagaatctgaaaaacgccatttcagtttactccggcgactttttgtccgacatgcaggatgaagagtgggtgacctttgccagtatgtactaccagcgcaagtatatggagtgcattctgggcgtgtgcgactatctgaaggcgcacgagcgcttcgaggaaattctggatctggtggacagcgtcaataaagtggagcggatgtatgaaaagatccatgaatattacctggaggcgctgctggcaatggggcaatttcagcgcgcgatggattactattactatgtggtggatcttttttattgcaagctgggcgtggatattaccggcaccctgcacgatgtatatacgcgtatcgtacaggtaatccccgattataaggtgagcatacgcaacctggaggaccggctgcgggaggatacgcagccttcgggttcattttattgcaactacgaagtgttcaaaaacatttaccgctttaatgcccggtccatccgccgggcgcgcaatgctcgctttttgatcctgcttacgttggaggatcgccgtacaagcgcggcgcccagcgaaacgatggagcagcaaatggagatgcttaagcagatcatctttgatcagctgcgccggaacgatgtgtttacccgctttagcgccacccagttttcgatcatcctctcggcgcaaaatgagaataactgtttgatcgccattaaccgcatcgtgcaaaaattcgaccagaaaaacaagcagcaagatatccgcatcctgtgggatgtcaagcagatcgagggctgaataagcgtcacgtatgcccacaaaaaattgcagatgagccaatacgtgataatatgtgatgctgttatgacagcgcgattttataatgaaagcagaatgaagataatagggcggattatgcgaaaaggtagaacgcggtgcgcgtaagaagttccacgaggcacgggaggaaaacggaatgaggaatagaagattcatgcgcaatgcaaatcagtggagaaggaaatggatcgcgtggctgttggtcattgcgatggcgatcccggggctgcagctggatgcggtagcctgggcggagccgtctgccaatatcagcctgaccactaaggtcctgaacgctgctgaagcgggctcggcgatcgatagcgtgccggctggcgagactttttacgtccaggtggcctacaacatcgcgcccaacagctcgggcgggacgtatgagaatccgcttatcaccatcccgatacccgatggggtggagtatgtagggttccgctccagcaatatcgtggcggatgtggtggaagggactacgccgaaccaccatgtcgccttcatcctcaatccggacctgaactccggcgcggcagggacgatctctatcgcctgccggtttaccaacatggtcaccgccaacgataagcaggtcagctttcaggcgaccatgggcgggacctatcctgttgagggccagcccaatcaggatatcggcgtggagtccaatacggtcaacatcaaaaacaccgcatcggacgagtggaacgtcaccaaggaagtgacggcgggccccacccccaacgaggcgagcgacacttatgaggtgacctacaagctctcggccaaactggcggggaactggaaccgctttggccgcttggagcttgaccactatgtgctgaccgataccctgcctaccaattacctggataatggcggggccacgttgatcgagatacgcgacaaggatggcaagctgctgacgcagggcgaggactataccaccacggccaatgatgatgggtcgctggcgacgattgccattactacctattctaaattcacccagcaggcggagggcgaaacctataacgtgccgctgaacgcgtcgctggacagcgactattatgtcaaggtaagctatccgcgttccccctactataaaccttccaacattccactggtcaaggaaaaactgaccaacacggcaaagttggaatacagcctggaaacggacgcgaacattattaccaaaaacgccaatgcgaccatcgagctgggcgaaaaagagccgcccactcaggcgcagagcctaaagatcaaaaaacagctgaagatcggagacctgacgtttgccctggatggggtcgctgtagcaaagggctattctcgcgcggccttctccctgtatatggatgaggattgcacgatcccggcgacggacatcaacggggataccatcgccacggagctgatccaaaacgtggagacggacgacgcgggcatgattacctttagcaacctgcgctatggtacttattatgttaaggaagagatcgttcccgaagggttcgccgcgcctacaagcgtggtgaccaaagtgacgattcaaaccaacggcaaggtgatctacggcgaggacaatacgcccaaggatcaggtcctgctcaccaacgaagccacgccggatggaatgggtatcgttgaattttggaagatcggcatgggcgcgggcggcaccgataccgcaccgctggatgggttgacctttaccctgcgcaataagaccactggcgcgagtttgacggctacttcggatgcgcaagggtatgtgcgctttgacgccgtgatggcaggcgattatgaactgacggaaaccggcctgggcggccatgccggggaatatggcttatcggatgccgtgaaggaattgaccgtgacgggcaacgcggtcaaccggccggcgacggatcagggtgccacgggcgatatgccctcggtattcctgaacgtatcggaaaagggtaaatttaccctgaccaagctggatgcaaacgaccatggcaaaaagctcggcggggcgaagttccggctgtacggcccgtacgattcggcgctgacccagccgccgatagacgatgtggacgatgcggtaaagtataccgagatcacgatcggggcggatggaacctatacttctgaagcgctggaacagggcaagtattttctgcaggagagccaggcgcccgagggctatctgctggacgatacctggtacgatgtaacggtgcagaaaaatagcactgccgtgatttccgcatacaacgaagaatatgcgcacctggcgatctataaatatggcgtgctgggcagcgggctgtacaagactggtctagccggcgtgcactttgagatttacgacgcgcggacgggcggcaacagggtgctggatgcggatattatctcctcgatagacgctaccggcaaccccaacaccccctttgtagacctgcccgcgggcacgtactggtatgaggaggtagcctctaccgtgccgggcgaatatacgccgatcaccgggcgggtagcctttaccctcgacgcgggccagaatctgacgctgacggtggataatgccacggtgtatggtcagtttgtgttccataagatggatgcgcgcaccggcaacggcgtaagcggggctgagttccagatctttgatgacgcggcctgcgctgcccaaaacctggtggataccgtgacggtggatgccagtggtaatggcacctcgcggttgctgccggtgggcaagtactgggtaaaagagagccgcgtgccgtctggctatttccaggagatcgaagtgatccgcggattggatggtggcgtagccatcggtacgggcagcgggctggacattacggaaaatgcgcagaccgaggtgactgtgaaaaacgacccggccgtcagcgtgcgcataacgaaaaaggatgaagcgagcaatgcctccggacaggatatcctgatcgacggggcgacgtttaagctgtatgctaccgaggcggacgcgcaagaggataagaatgcgctagacacccagactacggccaatggcggtgtgttggtgtttgctgggctgaagcccggcgaaacctactattataaagaaacggctgtgcccgcaggctatatcctggatagcagcattcatgcaatccaggcacctacgacggctgcggcggcgataaaagagattacggtgaccaatgcccatgatgcgacgctggtcatctccaaaacgggccaaatggatcagcaaaataccaatctggccggagcggtgttccatctgtatccacggctgagtgcagacgcggcgcaggataagcaggatgccggtgcctttgatatccaaaccattgccacgcagacaggcgggactggcaagctggagcatgtgatcccgggggattactggctggaagaggtcaccgcgcctgacgggtacgatctgccggatcagccgattcaggcgattaccgtggcctcgggtgagaataccgcgggctatgcggccaacgtgcatgcgatcgtaaacgaggcgggcaagggcaaggtaagcattcaaaagatagacagccacacccgaaccggactgacggcgacctttgatatttatccgaagaagccggatggcagttatgccgcccaaccggtaggacagatcaagaccagcgccgccaataatggtatcggcgtatcgagttggctggagccggggacctatggcctcaaggaaatttcggtcacgggcgattacgtgatggagccggattatcaggatgtggtgatcgtggctggcgaaacggcgcatctggacgcgccgctgaccattgaaaaccaaccgatgggcaagattttgattaagaaatttgccaagtggtcgttaacgcctgttggcggcgcgcaggaagacgtgcgctttactttgggcggcgcaaagtttgagatctaccataaaaccggtacctttgcagcggatgcggccggcgggaaggattctcccaattttgtgcaggagttgaccaccagcactgaaaatggccaggcgctttctcaggctttggcaccgggcgagtactgggtcgtggagactgcggcgcccgagcactacgagctgcccacgcccaatgagccggtggcgataaccgtgggcgccgacggcgctacggtggaacattcttttgacaatacgccggagcgcggacggatcaagatctacaagcgggagctgggttctgaggcgctgctggacggcgcgaactttgagctttacgtagaggacgcggccggaacggcgtacaccatcgacggccagaccaagtacctgacccgagtggatacaggcgatatccaaaccggcaccgtggtaggcgaaacgggtacggcgctgaccatcgagctggatccggataagacctactatctgcgggagctggaaggctcgccgctgatgcaggatggctacgagatggtgaccgaatggaccgggccgattcaggtaacggccgcgaccattgaaccggtaaccgtgtacaactataaaccggtcacccctccgggtattaaagtggaccaggcggataaggggctggaaggtgtgtggatcgccgtattcgagagcgtaacggatgcggagaatatgcaggcctatcttgcgaaccataccattaccgatgccgagatggccagcgcggattaccgcgccaacctggaggcaacctacaacatcgccagtatggcgcgctcggacaagaacggatcgtttgccttccgcgatttgatccccacctatacctattatgcgctggagatcaccacgctacccaactatgtgcgggatgcggattaccacgtggtcacggtcagcgatacgggcgataccttcaccagcgagctgcgcatcgtcaacaaggcgtatcgccagatcttggtgcgcaaggtgacccagctttcgggcgtgacatataacttaaacggcgtagagttctccatttacaaggccgagcctaccggcgttgccggcgagtacacccgcggcgaatttgtgaccaagggctttaccggcacgggcggcgcggcggagggctattataagtcgatcctgctgcccccgggcacgtatatcgtggtggagaccgcggtgcccgacggcttccagctagacgccaccgagcatgtggtcacgctggaggcgacgggcgacaatgagaccttggccgataacccgatcaacaatatcaccagttatggacgctttgcgcttaaaaaggtggaccgggatgcgccgggcaccaagctgaatgcgaccttcctggtggagaaggtgggggacgattcgcttgaatcctttaccttcagtacggataagacaaaggattattacctctccgagctgctgccggcggggacctaccgcattaccgagcagagcgtgcaggcgggatataccaacgcgcagacggtgcgggagatcaccattgaaggcggcaagatcaccgacgcttccggcgtgcgcagcgatactgtggatgccgatcaccccatcgacccgatcgccattcaaaacgtaaaacagggctcgctggagatcgagaagtacggcgtgtggcaaggtgggcgcgagggctacctcaatggcgtgaccttccgcctgtataagaacgtaaccggcgatgccgcgcaggattgcacgggagatgattaccgccaggtcaccacggcgggcaacgtaaaatccactatcagcaatctggatgagggcgattactggctcaaggagtacagcgttggcaacaacggcgcttatgccgccaatctcgcccccatccctgtgagcattacagctgggcaggccacccgcttaacggggaatgccgccgtggagaataccaccatttacggcaagctgaaagtcgtcaaggtggatgcaaatgacgagacggtcaaactgcagggcgccaagtttgagatttatgataacgctaacggcacgggcaccaagtacgatacgctagagaccaatgcccagggtgaggatacctcggttctgctggatcccgccaagacctattacctcaaagaggtgaagacgccggatggctacatgctgacggacggcgaatttatcgggcctttcagcgtgacggccaacggccttgccacctatatcgttgaaaacgacaagatacagacggtagaggtctataagtactatcaggatgcgggcaagcacgccgtgcagggggccaagttccaactttacgccagccgggaagacgcgctggccggcgccaacccgctgtttagcgaggataagaccactaacgccagcggtatcgtcagctttaccggcctgcgcccggaaacggattattatctggtagagcgccagccggccgaagggtatatggctaaccccgccccggtgctggtacgcacggataatagcgcgagcaagcgcgtggagatcgagaatatcccccagggcaagatcaagtttgagaaactggcccagtgggtcgattcggaaaatgcagacgttgccgtaccggtagaaggcgcggtgttcgaaatctataaatggaatggcgacctggccaccggttcgcggggcgaaaagctggagatgaccatcaccacagatgcgcagggctacggcctttccggctggctggaccccggtaattatgaactggtagagagcacggtgcccacgggctttgatctggacccgacgcaccccaattcctacaaggtaagcgtagctgccggcgagatcgatcagacctatgtgggccaggatcaggcgatttataacgtgcccaaccgcggacgttttaccctggaaaagcgcattaccggcaccgaaacgccggtcagcggcgcggtatttaacctgtataaggaaagcgcacagccgggcgccgcggggcagtatgagctgtacgacccgcaaaaccccacctttgaggtggacggcagttatacctccggcatgctgccgccgggcaactatatggttgaagaggtgagcgcgccggatggctacacgattgtagcgcctaaccggtacgaattcagcatcgtcagcggaactacggtacagtttgaagtgtataacgacgcgcaggggcggatcgagctgaccaagcgcggcgacgtgcaaaacggcagcccgctgctgacgggcgcgaagttccagctttataaggatagcgtggcacccggcaacgaagtgcaggatgttaagacgacacaaaacggcgtatgcgcttgggaaaatctggacgcgggcacttatgtgattcacgaagttagcgcgccggatggctacaaaatttctcaggcggatcagaccgtcgtcatcgctgcgggccagagccagtatctgacttatgatgccgctgtgaccaatgctgccgataagggccgtgtggtgatcagcaaggtcaatagcttagatcagcccctgacgggtgcgatctttgaggtgtggagcgtagatgagcagggtgatccggtagaaaaagtggatggcccgctgaccacccagggcggtattgccatgagtaagctgctgcctgccgcgcaaagcggcacgcggtacctggtcaaagagatccaggcgccaaacggatacacgctggacgaacggttcaatcccaccagcgaatgggtgaccatctatccgctgcatgtgccggccggtgaacagaatcaggtgacctttaccaatacgccaaccacggatattcagggctttaccggcattatcaacaagggcatcaccgatacacaggccgacgagagcctgctgatgcagccctttgccaccacgtttacgctgcgcgattatgcaaacggcgagaataacgtagcgatggatgcgtttaccgtaacggataataacgtggcgatgcagtactacgagagttcggattcctctacgccggtcgataagacgattgcgcagggcgactatgcgtttaacagcgtgcgcatttacaaggcgagcaatgccggcggcggcagcgtcagcgcgcgggtagagtaccagacctacagacaactgggcacggaggagtggacgccgctctcagcgacttatacgaagaacgatttgcagaacctggcggacgggcgctttgaagaggtcaacctggatagcgccctgcccgatggcgtaaaggccatgggcgtgcgcgtggtgtatgaaaacgtgggcgccggctttacggcgcaggggatcgatctggatattacctttgcgcagcgccaaggcgatgtgactgagcacgagatccgccgcgtgaccaatcaggcaaagttgagctatacctatagcgagtacagcaccaccggtacggcggtgccgcgcagcgtgaatcgcaatagcaacgtggtaacggctacgatcccgctgctggaggcggccaagacccgcgtatcgctgtccaacacccccacgggtacgatgttcttcccgggcgagccggtggaatatacactgcgcgccaccaaccaaagcgcggataccccgtttgtggatcccatcatttcgatggatctgcccggctatacctcgctggatcagttctatgcggatgggaggacctttacctttaccaacagcctgggtaaagtgctgacgccccgcatcgcttatgaatatgaggtgccggcgtcgcggctggacgagagcacgggccagatcgcacagatggccggcgtgacgaccacgcgcgtggtatttacctttgacgatgtggagctggccccgggcgaatcgatcgagatcaagtatcaggtctacattgcggcggataagccttccgaggtgacgcagctgctcagcccggcgtacttgagcagtgcctaccggctgccgctatcggtagagaatcccacgggggtgagctttgaaaactatatgggctctctggtggaaaaccccgacttggatgaagtggtcaacgatgagactgggctagagggccagaaccagtacgtaaacgccaatgccaacatcaccgtgcatgataataacgtgctgaacatctacaagtatgtgaaggggccgctgaacgacgattacctgccggctgggcaggtggccagcacttacccgggcggggatgtggattacaagatccggctctacaatggctccaccagcccgatcaagacggcgcggattatcgatatcctgccgttctcgggcgattcgtacgcgctgcgtaacgtggataacgtgatcgggcgctcgaccgatatgccaggccagatgatcctgacgggtgtggatgcgccgggcgctaccgtttactactcgacggcggactggtcgcaggatacgcgtaatgcgcaaacccccagtagcgagctgcccatggcctacgaaacggctgccgactggagcggctggacaacaacgccgcctgcggatttgagccaggtgacggccatcggcattgagatcaccttccccgatggggacctgatggaggagcgcgacgcctatgagatcgagctgcacatgcaggcgcctgggtttaccggcgaacagatcgaggaatacgtaggcaagctgatcgccaactccgccatgggtgcggtggtacgcgccagcaataccggcgctaccatcgattcggaggaccgagtcgaaaacgttgaggtgctttgcaacctggatctgccgctgggcagcattggcgattatgtgttcctggataacaaccgcaacggcatccaggatgagggcgatacctttgtggcggattcgccggtcaccctgcacataaagaaggtgacggtggacggcactacggaatcgcccaagaccacggctacggatgcagaaggcaaatatctatttgaggatctgccctgtaattacctaaaggcgggcgcgccgcaaggctctaccgacccgaaggactatatcggagagacgtactatacctatcgcgtggagtttaccaaccccgatacgggctatacggttaccgagcgctataaaggggaagaccgcacgatcgattcgaatatcgatgagaactatttctccgaggagatcacccttaaagttacgctggacgccctgggcgtactgcatggcgaggataacgacaccatcgatgctggcttcatcacagcttccgctctgggtaaccgggtgtggatggatgagaaccgcaacggcattcaggatcctgacgagccgggcgtaaacggtgttacggtcaacctctaccgggccgacgaagcggggacggtcaatcccgtgatttacaggagtaccaagaccgccacgatcgacggcgtagcgggcacttactggtttgagaacctgctgccgggcaagtacgtggtagagttcgatattacggacctgaagaatacccaaggcatttatgagtttgcctttaccacccccagccagggcgtcagcgatgtggacgactccgatgcgcagttcgccgctgatgagagcgaccgcatccgccaaacggaagtgatcgatctgccggtgaacacaagggatgagacctgggacgcgggactgatcacctacagcgcgctgggcggctactgctttgacgaccgggactacaatgatgtgcagagcattgggattcctttgcccggcactgtggtcacgctttaccgcgtggtggacggcttccgcgaggatacgccgtatcgcccgcaggtcaccgtgggcgaggatggacggtacttcttcgaccggttggaggaggggcagtatcaggtccacttcgacttcccggatgactaccgcgctgtgaaggctcatatggacctgaacgatactcaggactccgatgtggagatggagatcactaccgatctgaaccaaggctacacgccggtgatcgaccttggatacaacaccgtggacaccacctgggatgccggcgcctatctgctgggcagcattggcgattacgtgtggtacgataccaaccgggatggcatccaggatgcggacgaattgcctgtggccggtgtgccggtgatcctgcagcagcgccagggcagtgaggatgcttggtctttctacgaagagatgcagaccgatgagaacggctactaccgatttgatgggttaaagagcgggccagactccgggtattcttaccgcgtgatcttcggctttgatgtgaacgaggcgctgacgatcaccaatgcgggggacgaccctgcgctggattcggacgcgattccgatctacctgccgggctggggctttgctaccacggtgatcgacctgggctatggccagagcgatatgacctgggacgcgggcatcgtaacggagaagggcagcgtaggcgacttcgtctggtttgacgccaataagaatggcctgcaggatgaaggcgaagccggcatcggagggatcgaggtcgttctggagtacaatcccagcgaaaatgtagtggatgaggcgagctggatcgtcctggggaccgcctacaccaatggcgcgggttactaccgctttgacgatttggatgcgggttactaccgcgtgcgctttaacattccggaaatctatcaggtaaccacggcgaacgccggcgacaccgaggacgcgtatatgtacgattcggacgccagccgtgccggccaggacaatgcgtattattcgcgggccttctacctggagcagggcgggttcgatatgacctgggatgcgggcgtttatacgccggataccaccgtgacgacgcagggcgatggaggcggcatccaaaccggcgatggaagtatgccggcgggctacctggcgctgatgctgctgtcgctgatcgggatctgcgcatccatcgtacagaaaaagaaggaagaacgcggcgaatgatgaaaacggcatggggcggtgaatagcaccgccccatgcggcttttggggtaaaaataggcgttttatcacagaaacttttgcaaagttcttaagataggctggttatgtgacaggtgtgtgacttgcaatgtctatcataagattgtaggacgcaagcggtgtccataaattgtgagccatgagtaaagggatgcgattatgatgaggaaaacgatactgcgttcgcttacagcacttgttgtagtcttaacgctggttctggggagctttacaacggtattggccagcgagtctgccttgcggcttgccgcgcagaccgcagatgagccgggggtgcagatttttaccgtgtccaaccccaatggtgaggataaggaaatcacctggggcgatgtgaacggcaatatcacaaagcaggacgtggtgcctgccggcggcagcattacgctgcgctatcccgatgcgcagatgcagggcgtgcggatctacgtgagctatacgcttaacggggcggccaaaacgctgtacgccatcggcgcaaataagtacaacatcaccatcaaatacatgtccggcggggtagagctccaatcccaaaagcatgcggtgagcggtaactatacccatacggccccggccacccttacgtcgggcgggaagacctatgagctggcttcggcctccagccagacccacatgtttggcaagagcagcacgacgatgacctttgagtataaagagatcgtcaaacagccctatcagatctcggtgacctatgtggataccagcgatacccgccttggcggcgccacgctggatgtggccgtagatgctacggtgaaccacgataaccccaagacgttgagcgtgaacggccgcaactatcagttgatgacggggcagccctcttcgatcagccatgcctatggtacggcgacgcgcagctacaaaatttattacgagctggtgcaggaacctgccgctacggcatataacgttaacgtacagtatgtggatggcagcggaaagctgctgggttataagcgtgtaacggtaccggtgaatgagacggtgaatatcgatattcccgccagcatcgccacagccaacggtagccagtataaccgcgcctctggcgagccggctacgatcacccacgcctttgacaacactaagcgcacttatacggtgcgttacgatctggcggtcgccaccgcgccgtacgagatccgcattaattatctgtcttctgccaatggggctacccttgcgacggaaacggtgacggtaaaccttaactccacggcgacctttgaggcggtctcttcctttgagcgggacggcaccacgtattacctggcctcgggccagaaccgcaatatcgcccacgcattctctaacagccagcgcgtgtataacttctactataacgtgcagggccaggaggagagcagctacgcggttacggtgcagtatgtaaatattgcggataacagcattctctaccgcacggaacaggtagtttccagcggtgagagcgtatctttcgacctgccggcgacctacacggttgacggtacggagtataagctggtttctggacaggagcagacgatcgaccacgcgttctacctgccgcgccgcgtatactcggtgttctatcaaaacgcggccgataatacggaaaatgtggtcattaccgataatacgaccggcgtaaccaccattatcacgccagagggcaccaccactgttgtgaccgacggggaaggcaatatcgtcgaggcgacggaggaggacctggtggacatcctggataacccggttcccgctgccgcgggaacggaaccagaggatgacggcggcgacgtagtggatatcccggattcggaagtgcctgctgccgcggctgaacagccggcgagccaggcttggatctggtggacgatcgccggtgtggccgtgctggtagctggcggtatcctttggatcgtgctgaaaaagaagaaagcggctgaagcgaaatagtttggatgattaaaaacaggcgtccgtgttggcgggcgcctgttttcttttgctaagacttatacatattgtgtgcgggcttgcggcggcgtatagtggagggggaggtgaaaagatgatcatcagtgccagccggcgtacggatattccctgcttttattccgattggttttttgagcgcattcgggcggggaaggtgtgggtgcgaaaccccgtaaacctgcaccagatcagcgaaatttctctttcgccggaggtggtggacggcattgtcttttggacaaaaaatcccacgccaatgctgaaccatctacaccaactacaccagtatatgtattactttcagtttacgctcaacgcttatgcgagcgatgtggagccccggctgcccgataagcagcgcgtgctgatcccggcttttcaaaggctttcggatgccatcggcccggagcgggtggtctggcggtacgaccctatttttttgacgcggcgctacacgatggaaaaccatattcgttgctttgcggcgctggccaagcgcctttccccctatacaaagtggtgcaccatcagttttttggattattaccgcaataccgcccaaaacctggctggcctgacattgcagcattttaccccggcggaacaaaggcgcctggccaaagccttgggcgagatcgcccatagttatggactggaaatcgacgcctgtgccgaaacactggacctagaggaatacgggattggacgcgcccgatgtatcgatggggaattgctgggccggttgctggcctgcccgctggcaacgcataaagatcggaatcaacgcttggcgtgtggatgtgccgaaagcatcgatatcggtgcgtataacacctgcccaaatggttgccggtattgttatgctaactatagtgaaaacctgttgcgggctaatggcggccagcacgacccgcatagccccctgctgaccggagtaccggtggagggcgaccgcgtgagcgtaaaaaagatgtgttcgctgcgagagcagcaaatgcgcttgacggaagtatgagcggatcaatgcccagcgctttccaaagcccttccatgaggcggaagggctttttatgatctggggcaaaaaatcgatgtgatgtattgacttggagtttgctccaggcggtacaatgagggcgtaaagggcaaaagccgatttgacgaggatgggagtgttgaaaatgaacggattggataacggtatatttccgcgcggagaaaagatgccgccggagctgtcccccaattttatagggcaggcttatttgcatatgctggtcccgggtggaaacgcgtggaactgccccatcggcaatgtgacctttgagccgggctgccgcaataactggcaccgccatccgggcgggcagattctgcttgttacctctggcaggggctggtatcaggaggaaggaaagatggcacgggaattgcacccgggcgatgtggtgaccatcccggcggatgtcaaacattggcatggggcagcgcgggatacggggatgacccatatctccatcgaaaccaactgccaggcagggccggcccaatggctggaacccgtagatgaggcgttttaccaggcgttaaaataagaggaggaagaaaaatggagcagaataacggtaaaatattagtcgtctattattcccattcaggcaatacggaaaggatcgccaggttgatcggccaggaaagcggcggcgtattggctgaaatacggccgcaggccgcttatccccaggattataaaactgtggtggcacaggctaagggggaaatacaaagggggttcttgccggcgctggcgccggatgcggtgcctgacccggcggagtatgatgtggttctgatcggcacgcctaactggtggagcacggtggcgccgcccatcgccacttttttgacggaaaacgatctaaatggcaaaacagtggcgcctttttgtacccatggcggcggaggggtaggccatattgagcaggatattcagcggctatgtccccatgcaaccgtgcggcgcgcttttgaaacctatggcgacggcggcacaggcgcccgtgccaaggtgctgacctggcttaaagagatcgggttaaaagcttaaatacactagaacgaaatgccccacaggagttgcctgtggggcattggcttggactaatcatcagaccgctgatagtcggaggagagctgccgcagcagcttttcgatctcggcgggcgtgtcctgccgccttaaatatcgttccaattccgctttagaggcgtaaaagagataattcatgcggtatttatcgctgctttcaaaacctgcgccaacctccagcacgcgctcttgcgcagtttgatatccggctcggatcaacagtttaaattcatcacaataggtatcctgctcgggattggggaacgtcaggctgtagggggtaaatttgccgctgctggcaatgcgaccccagggctcatctaagatatgggcaatagcggcggcaatcatctcatggaacgtatggaacataaggatacctcgctttctgttttttagccggcggagcaagttaacttacttttaacgctattatagcatgggtgtgcctgcgcatgaaccccctactgcacaggtcttaatggaatgctaatttgacttttgctgccctttgtggttataattaatataattaacacatttttttattcatatttgcgtaaattctgcggattatggatggtcatttcgagtaaaactatacgaggagggaagatatgatcgaatttgagggcgtctataaagcctacaaaagtaaatctgtgttatacgatatcaatatggagatccggtcggatgagatttttgtgcttatcggttccagcggctgcggcaaaactacgctgctcaagatgatcaataagctaatctcctttgaccggggcgatattcgcatcgatggggagagtatcaacaagatcagcggcacccttttgcgccggaagatcggctatgtggtgcaggatggcgggctgttcccgcacatgaccattggagagaatattggcgtgatccccaaaatgctaaagcagcctcaggcacagatcgagcagcgggtggatgagctgctgcgcatggtcaacctggagcctaacttataccgcgacctgtacccggcccagctcagcggcggccaaaagcagcgcgtgggcgtggcccgggctttctcggtaaatccggatataattttgatggacgaaccctttagcgccttggacccggttacgcgcaacgagctgcaagatgagatctacaacctgcagcatcagttccacaagacgatcgtattcgtaacccacgatatggacgaggctatccgcctggcggaccgaatctgtatcatccaggacggacgcatcgtgcagctggatacccccgagcaggtgctgcgccacccggccagcagctatgtggagcagtttgtgggcaagaaccgcatctggtccagccctgagtttatcaaagctggggatattatggaggtggacccctgccgcatctccagagggcgcacggcgatacaggcggtgcagagcatgaaccaccgcaaagtagacagcgccctggtcacagaggggcgcaagctggtgggcatcgtgcggctgaaagacctgcgcaattttaaggattacaccatccccctggagcattttatctcggaggattaccgtaccgtgtatgaggatgattcgctgcaggatattatcaataccatcgactataaccagtccggcatcatcccggtcatcacccatgaagatgagctggtgggctacctgaccaagagcagcctgctggctaccctgagtaagcagtatatggacgaaggagaggaggggatgctgggtgtctaacttttttacgctgcttgtggataagcgatgggagctgttggacctgttcgtcgaacacatgaacatgaccactatcgcggtcttaatctcgctggccatcggcgtgccgctgggcattttgatctgccgcagcaaaaaggtctccagcatcgtgatcggcatcgccaatgtattccagtccatccccagcctggcgttgctggcctttgcggtgccctttgtgggcatcggcaccaagccggccatcattatggtcatcgtctatgcgctgctgcccatcattaaaaacacctataccggcatctcggggatcgaccccaagatgatcgaggcggcacggggaacgggactgaaccggacccagcggctgtttaaggtgcagctgcctatcgccgccccctttattatggcaggcgtgcgcatatccgcagtaacggccgtgggtacgatgaccattgcctcctttgtgggcgcgggcggcctgggctggtttatcaacctgggcctgaactctggcgacccggcgatggtgctgctgggggccataccggcctcgttgctggcgctattgctggactttatcctctccaaactggagaaggtgatcactcccgaggggcttaaacccgcggaccagatccagcatgtgtcccgcaaaaagcgcaggcggcaaaaggccgttgtttttgccctatgcggtattttggtggcgctgcccatcggcaccaatatcgcagagagcatgggcgggcaggatcgtaccgtcgtcatcggcacctcgaactttaccgaggccatcatccttggttatgtgtatagtgagctgattgaagcgaataccgatttgactgtggagcagaaattcaacctgaacgggacgaccatctgctttaatgccctcaagggcggcagtatcgatatggtgaccagctataccggcacggcgctgaccggcatgctgcaacagcccatctccagcgatgtggacggggtttacgatacggtcaagaccatgatgcaggagcagttcggtatccgggtatcccagcccctgggctttaataacaactatgtgcttagcgtacgtccggaaacggcgcagcaatataacctggaaaagctttccgacctggcggcagtctcctcggagttgcggctgggcgctacggtggactttatccagcgcgaggataacctgcccagcttgaaagaagaatacggcataagttttaaggaggaaaacggcttggcggccaatattcgttatcaggcgatcaccagcggtcaggtggacatcatcgatgcgttctccaccgatgcaatgctggaaaagactcagctgacgaccctggaggacgaccgcaactttttcccgccctattatgccattaacctggtgcgtgaggaaaccctggagcagcatccggaattagagggggtgctggccaagctggacggcgtgctggatgagcctaccatgcgcaatatgaactatcaggtagacgtagagggcagggccgcccagcaggtagcgcgcgattttctggcggaaaagggattgatctaaaacacgacgatgaaaaaggctccggcattttgccggagccttttctttgctctaccggggcagggcgcaggggtaatagggaatagtaaattccatgatgccgctggaatagggcgcgatggcgtactgttggtaaaagatgaccagcccctccggggtcaggtagaaattctgggggttgaattcggcgatgacgttctcctcataatcgtcaaagtaaatatcattgcccgcggcgatctgctcggcgatctggccgatgatctgctcggttagatcaattttatagtcgaaattgcgcgggaagaagtcctgcagcgtcaacgcgcagcctgctttcacgtcccaggagtggccgtaacgggtggtattgccgtgtgcgccgccggtaaatatgtattggtcccaatagaggctgagggtacagccgttatttagggtgactgtgtagttggccaccagctcgtagggcatgacggggaagccgttttcctggtcgtagtcgtactggtcagcggcggctgcaaacaggtccttacaggcgtaaagggccaaacgctgcgcacgctgactgtaaaaggcgttaatcttttccagccctttttcgcatccttctccctcgaattgaggatagcggatatcgtagtgcaggataggggtaaaatcatactccagttcttgggtcagctgctgctcggttacggtaatttcgcatgccatttgcatcatccctccttacaggcatgatatgcagagaggagaaaaattgcgcatgccgccccgccggatggatggcgtaacaggggccgcgcgggtgcgtgcggtgtctgcattggacttttcgcgggacgatgaaaaagaaagggtaaaaatatttttaaaaataggttgacaatgggaatgtatttgtgctattttttaaccaatcaaaaaacctttgatgtggaagttaaaccgcagagcgcacctacagagagcgggcgatggtggaagtcccgtggagagcggcgcggcaaatggtccactgagggcgaggggaaaggccggggtcaccggcccagtatctaagacgtaggccggcgttaacggcagaaaatgtgttggcatttttgtaagagagggccttgatgcgatggtgcgttggggccgtataaggtggtaccgcagatattcagtctgcccttatagaaggggcaggcttttttatttgcctgaatcgtccttttctcttacgtcagccgaagatttgaaaggatggttggaaaatggaaacaatggagaaacggacgcaggaacaaaacgcacaaaagcgggtggtcgccgtacaggagaaaaaggggttgggcgtctcggagatattgctgatcggtattttgctggccgccggcgcggtgcttaaattctttgtaggctccgtcatcaactttgggatgaaacccaatttcatcatagccatgtactgtctggtgatgctgctgatccggcccaaggtttacgaggcggcgatcatcggcctgctggccggggcgatctgccagttcttcccggggcagccatatatcaacattgccagcgaactggtgggcgcggtcgccatggtgctgctgatgaagatccccatgaagatcggcaaattttcgcttgcgcctgttgtatgcaccttcttggccacactggtcagcgggttcgcctttatcggcatcatgtatttgatgtactatacgggggcggatatcacccccacgccgctggcggcttttatagccatcatctttggcacggctaccattaacgcggtgatcgtgcaggtgctgttcccgccgctgaaactggcttttcggcgcaaatagaaaggcggtaacaccatgatccggattcgggatttgagctttaaatatcagggcggcgagggctttgccctacaaaatgtggaaatggatatagcaaagggcgattttgtgggcgttatcggcgccagcggcgcgggaaagtccacgctgatctacgccatcgggggcgtggtgccgcaccactacaccggcgatttttacggcagtgtgtgcgtaaaagggcaggatacggtggagacccggccggatgaactggcattgacggtgggcagcgttttccaggatattgaaagccagcttacggccatgaccgtggaggacgaagtgatcttcggcctggagaattacgggacgccgcgtgagctggtggcgcagcggttaacgcaagcgctggagatgaccgggatcgaaaacctgcgccaccgggccctggacaccttaagcggcgggcaaaagcaaaaggtggccattgcggccattctggctttgcagccggagatactggtgctggatgagcctacgggcgagttagacccacgcagtagccggcagatttttgaacttttaaggaagcttaaccgggattatgggacgacgatcgtcgtggtagagcagaaaatcatgctgcttagcgaatttgcggggcggcttgtggtgatggaaaagggcggcgtggcctatgatggcggcgtgcgcgaggttttgggccacagcgaggcgctgcggcggatggggatcaacgtgccgcgcgtggtctcgctggcggaagagctgcgcggcaggggcctgtatgacggggagaccccgctcaacctggacgaagcggagcaaatggcaaggcgggtgatgggcgcatgatccggtttgaaaacgtatcctttcgctatccgggcggcgcgcaggtcaaggcgctgaactttgaactgaacaaaggcgactttgccgtattggtcggggccaacggcgccggtaaatcaacggtaagcaggctgtgcaacggtctgctcaaaccccaggaggggcatgtctttgtgaatgggcaggatacgcgcagcgtccccaccagcacgctggcaaaggacgtaggttttctgtttcagaatccggaccggcagatctgccagccgacggtggaaaaagagatcggctttggtttgcggtttacgataagcgatgaggctgcccgcgcggcccgctgccgggaagtgctggatgcttttggctttgagggcgatagggtgcccttctccatgagccggggagaacgccagcgcattgccctggcctccgtgatcgccgcctgcccggatatcctgatcctggacgaacccacaacggggctgaattatcaggagtgcgtcaggatcatgtcgctgctgtgcgagcttaacgcaggcgggactacgattttaatgatcacccacgatatggagctggtgcaggactacgcacagcgggttctagtgctgtgcgagggtgagctgatcggcgacgggccggtacacacggtcatgcgggatgaggcgctgctggcccgcgcagccctgctgccggcacagataccggggctggcgctgcgcctgggccagggctttgagcagatcaataccgtgcaggagatggcggcggaactggaaaggcggtgcggctaaaatgggcggatttttggattatatcccgggtgatacctttttacacaggttgaaccccgtcaccaaactggttctggcgttcttgctgtgcgcggcctgtttctgcgcaggcagcatcccctttgtgttgggggtgatcgccctgaatcttttactggccgccagcgctggcacactgccgcgtgccctgcggctgttactggcattggcaaaactggctttgatgttttttgtgatccagctgctttttgtgcaggagggaagggcgctggtgaacctgccgctgggcctgatgatcacggacaaaggcttggccttttctaccctgctggccctgcgtctgatcggcgcgacgctgccgctggcgctgatgctctcggtcacccagatgagcgatttaaccggagcgctggtacagcagctgcacattccctatcgctatgcctttgcgctgatgacggcgatccgctttatccctacctttaaccgggagatgaaggatattatggaggcgcagacggcgcggggcgtggcctttgacacgaaaaacttcttcaaaaaggtcgggttgctccttccgctgtgcgtgccgctgctggtcagctcggtcgggcggatcaaccagggggccattgcagtggagctaaagggctttaaccgccgcaggcgaaccagtggatataagcgttatgctttccggctgtgggatgcagcggctgccggcagcgcggctgcactggtggtattggctgccgtgctgtaaatggatatttaaaagaaccccaagccctgcgtgggcttggggttcttatgggctatatggtataataaacaagataaatgcctgcaaagctatgggtggataagttcttactttggcgtaaggcattcccgccacgggacaggcggcgttaaccagcagaaacgagggatattatgaagcgcactgaccagcgttaccgcgaatatgtagagatattaaaccgggaactggtgccggccatgggctgcacggaacctatcaccattgcgtacgcagccgcaaaggcacgcgagaccttgggcgccctaccccagcgggtaaaggtagaggccagtggtaacatcattaaaaatgtaaaaagcgtggtagtgcccaataccaatcacctaaagggtattgaggcggccgctgccgcgggcattatcgcaggagatgccggccgggtgctggaggtgctcagcaacgtaagcgaagcgcaaaaggctgcgatagcggattatttggccttaaatgtgatagaggtgtgccgcgcgcagtcggactatgtctttgacattaccgtcacggtttgggccggtgcggatgaggcgcgcgtgcgcatcgtccattatcataccaatatcgtgttgatcgaaaaaaacggtgaaaagctgatggatcagatgctggattgctaccgtgcgcctgcgcaggaaaaagcggagcagccggaggattgcctgaatatcgaggagatcatcgattttgccaacagcctggcggttgaggatgttcagccggttttgcagcggcaggcacaatacaatatggccattgccgaggaggggctgcggggcaactatggcgccaatattggccgggtgctgctcaagacctatggggagcgcgtaagcaaccgggcaaaagccaaggcggcggctgcgtccgatgcccgtatgagcggatgcgagttgccggtagtgatcaattccggcagcggcaaccagggcatcaccgcttcggtcccggtgatcgaatacgcccgggagctgggcgtgggcgaggataagatgtaccgcgccctggccctttcaaacctggtggcgatccaccaaaaacggtgcatcggcacgctttcggcctattgtggtgcggtcagcgccggcggggcggcgggggcgggcatcgcttatcttcatggcggcgggctaaaggagatcgcacataccctggtcaattgtctggcgatcacctcgggcatcgtatgcgatggggcaaagtcctcctgtgcggccaagatcgctgtggccattgacgcggcgatcttaggttatgcgatgtatgaggatggccagcaattccgcgcgggcgaggggatcatcaaaaagggtgtggaggctaccatctccagcgtggggcgcttgggcaaagtcggcatgcgggagaccgataacgagatcatccggatcatgatcaacgcggaggaagaagaataaaagcgcaaactatggaaaagaaagagccggcagttttaactgccggctcttttgcgcttgtctagatcacgcgcttggtcttccaacggccgctcttgtagcggatccagaagatgatggcgcgcaccgcccaatcgatgtacatggcgtaccacacgccctgcaaacccatgttaaagccctgcgccaggatataactaaagccgatgcggaagatccacatggagatgaccgaggcgaccatggtaaatttggcatcccctgcggcgcgcagaacgttggcaaaggggaaggcgatgggccacagcaaggcgttgaccacgcagaatatctgtaaaatctgtatggccagcgtggtggcctccgggctcaggttaaacatgcccaccagcggataggccagcgcaaagatgatcaggttcatggcggccatggccgcgtagatcagccccatcaaccggcgggtataatacaccgcctggtcgtacgcatccgcccccacacattggccgatgacggtgatcatcgccaggccgatcgccaggccgggcacgttgatgacggaggtgacgctgttgacgatggcgtttgccgcaatggccgaagtgccgaacagggcgatcaatccctgcaccatcagcttgccgatttggaacataccgttttccagtccgttagggatgccgaccttcataatgcttttgaccatctgcggtttatactcaaagtgcagcagaccgtccacatagatcatgttattatggctgcggatcaaaatcagcatgaccccagcggccagcgcacgggaaaccagcgaggcggtggctgcacccgcaacgccccagccgcacccaaagatcaggatggcgttgccgccgatattgaccacgttcatcagcaggctggtgagcatggagactttgctgttgcccatggagcggtacagcgcggcgatagagttgtaaatcgctaaaaacggataagaaatggcggaaagccagaaataggtcaacgcgttttccattacgtcagcttcaatgctgccaaataccagctgcaagatgcctttttgaaagaacaacgccaatgccatgagaatcagcgagagcagcgtggaggtatagatcagctgtttggcggctgtgcgcgcgtttttatgctcctgccggcccaggtactgggaaaccaccactgcgccgccggtggccagcgctgaaaagatctggatcagcagaatattaatggaatccaccaacgatataccggaaaccgcggcctcgcctgcggaggtgaccataacggtatcggccatacctacggccatagccagaaactgttcgatgatcagcggcacgatgagcttgcgcagcatctgccgggaaaagagcttttgttgggggacaagggtttcgctgggcatagaatgctcctttcgctattatgatcttcttttatcgtaggctatactattatatatagaagaaaagccccacgggaagaacggaggatacaggaaagcccgctatggcacttaataaagtgttagcaggcaaaccggtcaaaaaaacttaggcatctaaaaggttatagctttttaaaggatttgtcaaggctgcttaatgttagcaagacaggaccggcatgaaaaaagcttccctatattatataaggaagcttttttgcaaggctcagtttttactcggggataacgttgaccgcttgcaggccgcggttgccactttcggtatcaaacgttacgtgctggccctcgttcagggtcttataaccatccgtctggatcgcggagaagtgtacgaacacatcctcgccgttttccatcgagataaagccataacctttttctgcgttaaaccattttaccgttccgtgattcattgatcggtacctccaaaatattctttcttatcccagacgcatgaaaaatcgcgtgcagtcgtaaatcatttaaacgatgctaaatgatttacaaccacacgcgaaatcaatccatccatctaaaatactttatcactatagcattgacgaaagacattgtcaatatccctttacagagcaaatctataaagcggatacttgaaaagggttttctacattatataaagggaatggtaaagagcctgaaaagtttgtgatattttgccgcggcagacgatttgaggatatgaaagaaccagagaagcggagactacgaaatttcacacttcgtaaaatacaaacaacctaataaaatcacgtgatgaaaaatatattgtgaaattgatttgcttgggaatacaatattaagtacttataatcattataaataaaactataagtttatctttgaaaaagccgattatacaaaaagtgggaaatatttaccctaaaagtgtagatttcaggtgtagatatggtgcgttaacgtaaaatttaaccgtaaatctgacaagttttgcaccgcattaagggactgagacctgctgcaaagaagcaaaggaagttgagaaaaagttatatttttgtaataaatttaaaaaaattttaaattgtataaaacagaataaaaatgcgaggcggattggctcaagaacggtgtggaagaagcaaagctgccatgaaaaacgtaaaatacgcaggattttgcaacttagatacaacacctttacatttgccgtttacacgatggttgttaaaatgtgggacaagtccaatataacgcgggaaaaatgctgcaaacactggaccgccaggcgtttgcgggatatgagagtactttgaacttgttttggtatgctaattgcatgctttaaagcgttaaaataccatcaagacttacggagcggttggaaagacatttaggccaaattaaatgaaacaaaaacgataaaaaacgatcaaatatgacctttctaaaaatctatatataaattgatataaaagaccattgaaatgataaaataccaatatttatcatgtattatggggttgcattttttcaaaaacggcgtatataatgactatcgatcgctcacaattggatgtgtcagaacaaattggcgtattctgacacgtcaaccaaacggcctcaatggacaggaacgcacaaagtgtgcgcctgaaaaggagggccgcaaggaaggagatttaaactgtgaataatcaagcgatggcttccgtcttgctgggggcgatgatgatcctaaggatcggccagccggcggacgcagttccgtctgaggtaacgcagccgcgtacgacgcaggtgcagaccctgacgggggaagccaaaccggtcccggagaatttgatcaagtggaccatgcagacgcaagaagaacaggaaaaagagcgttgccaatggattacggatcccgcggcacaggtgcgcgagttgaaattggctgacagcaagcttcaggcagaaaaagaggcccaggagcgcgaggcggcccaaaaggctgctgaggaagaggcggcgcgcaaggctgagcaggaacgtaaagaacaggaagcagctgcgaaaaaggcagcgcaaaaaaaggcggcggccaagagccagagcgccagcgctgtacaggccagcggcggcagcattgaggtaggcggcaggagttaccgggtggtttccagcacgaaagcgaagatcactgcttacacccatacgggtaatcgcacggcatcgggcgcctggcccagcgcaggtatggtagcggtgcctaaaaaggcattgcgcagcaatttgccttttggaacaaagatctatatcgaaggatacggtattgtaacggtgagcgatacaggcgacagccggatggagaactatggcggcctgtggctggatatttttatggacagcgaatcggcctgccgccaatggggcgtggccaaccgtaccgtatatgttttagcataggaagaacgggcgccccatggacgcctgtgtagaagaaaagccctcccggtattcccgggagggcttttcgcgtggatacgctgtttggtataatgaacttaaagcgcggggcgcggcatattatagatagaaaatgtgaaggacgggaccttgaaggagggggaaaagatgcgtaagtttccaagaacgcagatcggcgggttgtcggtatccaggatgatcatcggatccaactggttttgtgggtatagccacacgtcaaaagcgcaggacgactatattaaagagcatatccacaaccgcgaggccatggcgaagattttggaggtctttttccgcgcaggggtagacacttttatggcgaacatgaccgatgaggtggtgcgggacgcggtgcatatggccgaggatgctaccggcgtagggtgcaatatgatctcctcgctgcactttaccgttacgcccgagaccccggcaaagggttttgatttaagtgaagtagaacggatattggatgaacaggccgcgctgggggtaaagatctgccagccgcaccaggtggtgaccgatgccatggcggataaatgcacccgggagatccggcagatggcgccggtaatgcgcatgtgccgggagcgggggctgatccccgcgctttcaacccacatgccggagacgatccagtttgcggatgaatcgggactggatgtggagagctatatccaaatctataattccatgggctttttgatgcaggtggaagtggataccgtgcatgccggcatactggcggcaaaaaagccggtgatgaccatcaagcccatggcggcggggcagctgcggcccttccaggcgttgcattttgtttggagcacgctgcgcccctgcgatatggtcacggtgggttgtatgtccccccaagaggcgcaggagtgtatcgacctttcgttggagatcttagataagctgggacagtagcgcacttgacggcggctcattccatctctatggtgataagaactgtggatggaatgggccgccgcttttaccttaacatgccgtaaatttgaaactttcggtaaatcgggttataatataaggcgcgacgtttgaaaagaacctttaaatacgccggaggaccggataaatagcaaaagaggacttgtataatgaaagggattatcttggcaggtggcgcgggcacgcgcctgtacccgatcacccaggcggtgtccaagcagattctgccgatctatgataagccgatgatctattaccccctctcggcactgatgctggcggggattcgcgagatcctggtgatctctacgccacgggatatcgccacttttcaggagctgctgggagacgggcatcagtggggcctggcgttttcctatgcggtacaaacggcgccccgcggccttgccgacgcgtttttagtcggcgagcagtttatcgccggcgagcgggtggcgctggtgctgggcgataacattttttacggacacggctttagcggcgcgctgaaaaacgcggcggagcgccagcagggggccacgatttttggctaccacgtcagcgatccacgggatttcggcgtggtggagtttgataaggactttcacgtggtatctctggaggaaaaaccggagaatcccaagagcaattacgctgtgcccggcctgtatttttacgatgagcagattgtggacatcgctaaatccatcaaaccctctccgcgaggagaactggagattacctctgtcaacaacgaatatctacgcctggggatgctgaatgtggaactgttctctagaggcatggcctggctggataccggtacccaccgggggctgttacaggccgcaaattttgtagaggtcatccagacccggcaggggcaatacgtatcctgcatcgaagagatcgcctaccgacgcggctttattgaccgggagcagctgcagcgcctggcccagccgcttagtaagacggaatacggacagtaccttttgggcattgcgaaggaggcactgtagatggcttttgaatttgaacatttggatatcccgggtttagtcgtcgtacatccgcaggtgtttggagacgcgcggggatattttgaggaaaccttccgggaggatgtctttgcccagcacggcattaagggactgtgccaggacaacgagtccaaatccaccacgaaaggtgtgctgcggggcctgcattttcagacccagcatacccaggctaagctggtgcgctgcattatcggtgctgtatacgatgtggcggtggatctgcgcaggggctcgcccacgtacggccagtggcgcggcgtggaactgacggcggagaaccacacgatgttttacgtgcccgagggttttgcccacggctttatggtaacaagcgatgaggcggtattcgcctataagtgctcggattattatgcgccggaatatgagggcggcatcctttggaacgatccggatatcggggtaaagtggccgctggatattgcgcccatgctatcccccaaggaccaggtactgccccgcctgcggcagatcaaagacgaattgccatttatctatcagggctaaaatttgagggagaatcgctgcatatgaagacctatcttgtcaccggcggtgccggatttatcggctcgaactttatcgagttcctctttgaaaagtatggggatgacgtgcgcatcgtcaattacgataagctgacctatgcgggcaacctggagaaccttaaaagtgtggagaatcgtccgggttaccgctttgtacagggggatgtgtgcgacgcacaggcgttgggcgccctatttgagcaggaagatattgattacgtggtgcactttgcggccgaatcccatgtggaccggtccattgtggatccggagatttttgcacgcaccaatgttttgggaacgctgacgctgctgaataccgccaaggcggcctggcagcagggggagggctttaaacccggcaagcgctatctccaggtctctacagacgaggtgtacggctctctgggggcggaagggtattttaccgaagaaacgcccttggacccgcgcagcccttactcggccagtaaggcgggcgcagacctgctggtgcgagcctatgcggaaaccttccatatgccggtgaatatcacgagatgttcaaataattacggcccttatcagttcccggaaaagctgattccgctgctgatcaacaactgcctggcgcataaaaatctgccggtctacggggatgggatgaatattcgggattggctgtatgttaaagaccattgcaaggccatcgaccgggtattggaagcgggccgcccgggcgaggtatacaacattggcgggcataacgagcgcaccaatattcatatcgtcaagaccgtgatcgaatatctccacgaaaacaaggattccagcatcaccgatgcgctgatcacctacgtagcggatcggaagggacatgacaggcggtatgctattgacccggaaaaaattacccgcgagcttggctgggtgccggaaacgccttatgaggagggcatcaagctgaccataaaatggtacttggataaccgccagtggatggagcgggtgaccagcggcgcctatcagcagtattatgagcggatgtacgctgcgcggtaacggcaacaacgcctgaagggggcgaaggatagatttcttttcacgcatagaccagagcggaccgactaaggacaaaaggagtagtgaagatgcgttttaaggaactggggaaatcggggatcaaggtatcggccatcgcagtaggcagctgggcgcttgggggcggccctgcctggggcgataacgacgaaaagcaatccatcgcggcgctacacagcgcgtttgaccacggcatcaacctggtagatacggcgccgacctatggcctgggtttaagcgagactatcgtgggcaaggccttgcaggggcggcgcgacaaggtagtattggcgaccaaatgcggcctgggtttggacaagccgggtggcacccagcgggtgaaccgcggggaatatgagagtattatgagccaggtagaagaatcgctaacccggctgaatacggattatatcgatctgtatcagatccactggccggattatctgactcctatcgatgagaccatggcggcgcttgtgaagctgaaagagcagggcaagatccgcgccatcggcgtatcgaattttgacgaggcactgctggccgcggcgatggactgcgggcagatcgattgccagcagccccagtattcgctgttgcatacggtgaacgagccgatcatggaattcggtgccgagcgcggggtaggcgtactgagctatggctccttaggcagcggcgtgctcagtggcaagtataaggagaagcctgtattcccgcagggggatgcgcgcaacgccatgtatgcgcccttcttccaggagcctatgtggaccaagatcacgcagctgctggatgtgttgcgccagatcgcgcaggcgcatgaggtaccggtggggcaggtggccatcaactggagcctgaagcacccctatatgacggcggccctggtgggcgtgcgtacgcccgagcaagcggcgcaaaacgccgctgccggcgactgggaactgacggatgaagagtttgccacgatcaacgccgcgcataccaagatctttggtggcgggctgctgggcaagcgggcgacctggcccggcgtgcggcgcaagaagtttcagcgggactaagagtatcatacagaaagcgaaggaggaaatacgatcatgcgttttaaagaattggggaaatcgggcatcaaggtatccaacatcgccatcggctgctgggccatcggcggagataaattctggggcggcaatgaggaaaaacagtccatcgaggcgctgcaggccgcggtagacaacggcattacgctgatcgacactgcgccgggttatggcagcggcgtcagcgagcagatcgtaggcaaggccatgaagggccggcgcgacaaggtcgtattggccacgaaggtgggtattcccatcggcccggatgcggacggcgcctgccatagcgattacgacgtgatcatgcgccaggtggatgaatccctggagcggctgcagaccgactatatcgatatctatcagatccactggccggacttcctgacaccggtagatgagaccatggcggcgatggccaagctcaaagagcagggcaagatccgcgccattggcgtatccaactacgacgaggccatgctggccgcggcgctagactgtgtgcagatcgactgcatccagccccagttctccctgctgcacacggtgaaccagcccattatggaatttggtgcgccgcagggcgtgggcgtgctcagctatggctcgttgggcagcggtattttgacgggcaagtataaagagatccccacctttaaggatggagacgcccgcacagagatgtatggcccgctgttccaagagcccatgtggagcaagatccagcagctgctggtcgtgctgcgcgagatcgccgaggcgcacaatgtgccggtaggtcaggtggccatcaactggacggctcagcatccgttggtatcctccgcgctggtgggtgcgcgcaccgcggcccaggctgagcagaacgcggcggcgggcgaatgggatctgaccgatgcggagatcgcgcgcatcaatgaggcccatacccagatcttcggcggcgggctgctgggcaagcgcgcggtatggagtggcacgcgggccaagaagtataaaaggggctaaacggaaacgtttaaacaacatacattaaaggagaaatgaagcatgaggtataagaagttaggcaataccgacctgaacatctcggtgatgacggtgggaacctgggccattggcgccgacggctggggcgatgtggacctgaaggattccatcgatgcgattcacacggcgctagataacggcattaactttatcgacacggccccgatctacggctttggcaactcagaagaggttgtgggtaaggccatccaaggctataaggacaaagtgatgatcgccaccaagtgcggtatcgtttggggtgatgacaaggtctcccgcaagtatgccgggtatgacagcatcatcaaagagtgcgatatgtccttaaagcgcctgggtgtggatgtgatcgacctgtatcagatccactggccggatgtgaccacccccattgaagagagcatgcgcgcccttaacaagctcaaggaagtgggcaagatccgctatatcggcgtatccaacttctcggccgagcagatcgaagaggcgcagcagtatggcgaagtcaacagcctgcagcctccgtactgcatggtcaaccgtacggcggaggacctgatgaagtggtgcaagcagcgcggcatcggcacgctgacctacggttcgctgggcgcgggcatcctgaccggcgcgttccgcgagctgccccactttgaggcggacgaccggcggctcaaattctacgattacttcgtagagcccaagttctccaagatcatggagctgctcaagaccctggacgccatcgcggccgaccacggcaagcccaccgcccaggtggcgctgaactggtccacccagaaccctatcgtggatacggcgctgtgcggtatccgcaacccccgcgaggccaaggagaattgcgatgcgatggactggatgctctccgaggacgagatcaagaccatcgatgcggcgtatgccaaaatctttggctaagggataaaacttatatcaatacccgggcgcttggccgcccgggtatttctttatctggagaagaaatccggcaatcaggcaggaaaatggacgcgccagcgcgaaacatatgtacagcgtgttaaatagaactgcccctgcttttttatggggggcgaggataaaagaaaggcggggaaggatatatgaaccgtatttttgtcaacctcaagcggtttgacgtgccgcgtcacttgggcggactttgccctatggatcgcgcgccggagtgggtgcagtggatcgtggcgcaatcggtcgcggcgggcttgggcaaactccaggatctgacgctgacttatcttctgcctgaatcgctgatcgtaccggcgctggaggctttgaaggagtatccggacgaccagaaagcgggcattaccatcggcagccagagcgtgtaccgcgccgatgtgaagagcgggggcaattttggcgcctttacggctgaccggccggccgcagcgatgcgcgcgctgggatgtgagtggagcatggtggcccactcggaagagcgtaaagataagctacagatgcttaccgcgtttgaacccaagatcgatacctgcgaaagctgcgcggcccgcgcggcgcagacggtggatacgttggtagggcaggaagcggcccgcgccatcgagcaggggatgaaggtgatcttttgcatcggcgaaacggcggcccaacggggcgagggcagctttgaagagcagcagccgcgcatcaaagccgtgctggagcagcagcttggcgcccttaagggcatcggcgcggacgaggggaacctggtgatcggctatgagccggtgtgggccatcggcccgggcaagaccccgccgggaccggattatatcgcctatgtatccgacctgatcaaaaaaatcggcaaagagatgttgggtattggagatctgccggtagtgtatggcggcggcttgaaagaggaaaatgccggccccatctcccagatcgaaaccattgacggcgggctggtggcgttgacccgctttagcggggagatcggcttttatccggacgaactggcgaagatcatcgccaaatatcaaggaaagtaagaggagtgcgtaagatgaaacaggttatgatcgaatacggcgacgggatgatgcccattgaggtgccggacagtgcgactatcgtcagccctgaaacgcactatgtagacccgccggaggtagacccgcgcgcagccacgcgcgaggcgctggaccatcccctggggatggatccgctttacctgcaggccaagccgggcaaaaaggcggtcatctgcttcccggaccgggtcaagggcggctcgcacgacctggcgcatcgcaagatctgtatccccatgatcgtggaggacctgaaaaagggcggcatccgggatgaggatattaccctggtgtgcgcggtggggctgcataaaaagaacagctatgaagaaatgctgggctatctgggtcaggagatcatggatgagttctggccggaccgcatcgtcaaccacgatgcggaggatccggagaatatgatcgaactgggcgtggatgagctgggcgataccgttaacatgaataagcaggtgtatgaggcggatattgccgtgatgatcggccacgtgcagtgcaacccctacggcggctacagcggcggctataagatgtgcgtgaccggcattaccggctggcgctgcatcgctagccaccacgtgccctcgaccatgcaccgggatgactttttgccggtcaataccgagcatagctatatgcgcaagcagtttgacgccattggccgcgcaatggaaaagggcatgggcaagcggttcttctgcgtagatgcggtgctgggcagccgcgcccaggtgctgggcgtatgggccggcgcgccggacctggtacaggaggcctcgtggccgctggcgcaaaagcgcacggatgtgttccttgagaatcaggagccgtttgatatcatgatctttgggcagcccaagaccttccactatggcccgggcatgggtaccaacccgattttgatcctccaggctatcggcagccaggtggcgcggcacaaagaggtgttccgcgagcagggcgtggtgatttgcgcgtccctttgcgatggatggtttaacgacgaatggttcccctcctaccgcaagctgtatgagaagctgcagaccattaacgattttggacaggtgacgaaatttgccgaggagatctctaccgaccctgatgatattgcggcctaccgggcgggtacggcatatcacccgttccatgcgctttccatggtttccatgggcggggtagcgctcaaccacacttcggcgatctatctgcccggcgccaaggcgggcggctatgcgcgcggcatgggcatgcggcccacggatacctttaaggaatcgctagaaaaggccatcaaaatggtgggtaaggatgcgcgcattttggtgcagcaaaaggcgttcacagccgtctctgtacatttgaagaagaaataaaactaaggctggaaacgaataaaagcgggctcccgtatgttacgggagctcgcttttttaaggggcgtttaatgttattgcagggcagcgctgcgatcgcggcgcaaaatgcgggccatcagcattagggcaagggctgcggtcagcgcgcaacccacaggaggggcgagccaaacgccattaagccctaaaaatgatgggagaatggcaagcgcgatgagggggaagaccaatgcccggcaaagcgccagcgtcagggacaggccggggcgattgactgcggtgaaaaaagcgcttaaactggtccccagccatccggtcagataggatagagagaacaacctcatggcgttgacgctcatctccagcagatcggctgtaccgtccgccacaaaaagggagattacgctatgcccgccccactgcatccagacaagggcggccagggatatcgcggcacaggcggccagcacccgcttttccagcgcgaacatccgccggcgcagaccagccccatagcagtagctgatggcgggttgcatggcgtctgacaggccatagagcagcgaggcgacaatgctgtctacatagagcacgatagagaaggcggccacggccatcgcccctgaaatgcgcagcagcacgctgttgagcacgagcatcagcagggaaccggcgatattggagaaaaattcggaagatccgtttgctaaaatgttgcccagcagcgccagcggaatgcaaccgcgcgtaaacctcagcgcaagcttatgccttaaaaatggcgcaaagcccagcactgtgcccaatgccagactcagacaagaggctagggctgcagcctctaccccccagtgcagcacgccgacaaagaggcaatccagcaggatgttgagcagagagatccctacgttaagccccatgctgtaacgaatctttccgcagatacgcaaatagttgtcaacggcaaaaaagactgtgataaccggcgcaaacagggcatagatcctgaggtattttacggccaacccggtcacagttggatccgcgcccatgaggcgcagcagcggctgggctagcgtatagcctgccaacccgatcaaacaggcgatgccgataatgagcagcgtacacacgctgaaaatacggctggcttcgcgttcctttttctcacccaggcgaatggcgatctgtacggaagaaccaaccgccagcatatccgaaagggcaaaactcatcataattggcggcatcacaaggttgacggctgccaaagcctccatgccgataaagtggccgacaaaaaagccatcggccacggtgtatagcgctgtcatcgccatgctgagcatgctgggcagcgcgcaccggaaaaataagcgggtaggagattgcgtcgtataaagctgttcgtgcggtgtcatgattcccttcctttaggcgtttttaatgtactcctggctaaaggtatccagtatttcgcaaaatgtatcgatctcttcttttttgaagcgcgcttctaccagctgtacagcgcgctcaaaaggcccgtcgtacgcgcgcagggcagaggcgaccatatctgtcacgtttaggtaaacgacgcgccggtcggcctgactgcgggttttttcaaccagccctaacttgaccagatcccctaccttaatcgtagctgcggcgcgagagatatgcagcgtatcggccagagtcgtcaaggtgcagcccccctgctggtgctggtaggagatgacatccagatacataatgctgttgtaggacagcgtaccaccgcctgtgcggccaagctggcgcagatcggcaaccgttgtatcataataatagcgattgagactatctcgcaagttcattgacacacctcgttttattaagcaaatttaattaaatttacttaaatatactgccgggtaaaagatttgtcaatacgtattgatggccgataatgacggtgcatgttgctttcatgcgcgctgcccgtcatttggggcaaaagggtttgacattctattatcagtttgataatgtaaagcaaacaggaggggtgaggttgaaagagcgcacgatcgatatactgatgcatccgctaaagggcaggctgatgcttgaaatatggcgccgcggtgaggcaaccacccgggaactgggcaaggtatgcgcggatatccctcaggccacgctgtaccgccatgtccgcggattgttggatgcgggggtgatcgtggtcgttcgggagcaaaaggtgcgctccgtcaaagaaaaggtctatgcggtcagcgagtctttccggcaggagaatgcgtattcgcaggaacaggcgatgacgggcgaccagtttttggccttgatcgcacatggcatggcgaacttgatggagcagctcagcgtataccgaggacgggagaatatcgacctttcgggagattatgtttcgttccgcgtggccgggttttatgccagtgatgcggaaatggagcagatttttatgcagctgggtcaaatcatcagccgggcaacggccaatgactatgcgcccgggcgcaaactgcgcaacctggctacgatctccaccccgcccaggacggggaaatgtagaaccccacaagaggacagccacggaccgaaaggcccggctaaataaaggcaccctgatatcaggactgccggagaaaaatgaagaggtgcgttatgttaaacatcaggaacctgacaaagcagtatgccggaggtaaaaaggcggtagacgggctgacgctggatgtgcaaagcggcgagatcttcggctttatcggacataacggcgctggaaagaccacgacgctgcgcgctgtagccgggatactggatttcgacgagggagagatcaccgtcgacggtaaatccatcgccagcgaaccggttgcggccaagcagatcatggcgtttttgccggataacccggacatgtatgagtttttaagcggcattgcctatttaaagtttatcgcggatatctacggcatccccaaggagaagcgggaggcgctgatcgccaaatatgccgatgcctttgagatgaccggcgccctgggcagcccgatcgccagctacagccacggcatgaagcagaagctggcattgatcagcgcttttatgcgccagcccaagctgttgatcctggatgagccctttgtggggctggaccccagcgcggcccatctgatgaagggctttttgcgcgagctgtgcgatgcgggcggggcggttttcttttccacccacgtgctggaggtagccgaaaagctgtgcgaccgggtggccatcatccggaatgggaagctggtcgtccagggtaaaatggcggatatcgtgggcgactcctcgctggaggaagtatttctggaactggtcgaacagggcaagtaggcggggtgaagcgtatgaaaaagttttggaccctattaaagctggattttaaggccctgctgatgaacagcaatatgggcggccggcgcaataagcgccgggcggcaacgggcctgggtgcgttgatcctgatctgtgcggtgatgctctacatctcgggtatctattcgtttatgtttgcccaggtgctctctccggtaggcgggctggacatcatgctgatgctgatggcgaccttgggcgcggtgatgatgttcgtcttcaccgtatttagcgcccagggagtcgtctttggcggaaaggataaggacctgatcttttcgctgccggttaacgcctttacagtcatgctcagccgggtatttgccgtatacctggagaatctggtcatcgggctgtttctggccgtgccggcgggcattgcttacctggtctatggcggtgcgggcggcgttgggtttttgctgatgtttttagtgggcatggcgtttttggcgctgttgcctacgctgctgtccctcatcgtgggatttgtgatctcgctgatttccagccgcatgcccaaaaagaagctgatcaacaatatcctttacttcgtagcgctggcgctgctgatggtatttgcctttagccttaacgcccaaatgaccgggatcacccaaaacccggaggggatacgcttagcgctgcagcaatacgtgttcccggtggcgttgatgcagcaagcggcctgcaatgcagacctattggcgctgctggtgctgatagccatcagtgtattgccgtttgtggcgctggtatacctgttctcccggtgctataaaaaggtgatcacaggccttgggagccatcagctgcgcagggattataagctgcgcgaggtagcagcgggcagcgcctttggcgcgctgctcaaaaaagagtttagccgctacacgggttcttccatttatctgatgaatacagcttttggtatcgtattgatgctgggcggcggcatctattgtctgtttgccagcggccagattagcgatatgatcgcgcagatcggccttgatacacaggtgatcttccccatggtgctggcggtcatcctgtttatggtttccacttgctgcaccacggatgtatccatcagcctggagggcaagacgctttggattttaaaagaggcgccgatcgatactatggagctgtttaaggcgaaaattttgcttaacctattggttgcggtgccgggtacggcgctcagcgccctgctgatcgggctggccttccattttaccgcggtacagatactgatgctgatccttttgccggcgctgttctcggtgctggtggcggtctttggcctgatggttaacctttacctgcccaagttggatggcaccagcgacgcgatcatcgtcaagcaatccatgagcgcctttatcggcatctttgggccgatgctgttggtcatcggcctggggctgttatatgcgtttgccttaagcccgctaatggcttttgagggcttttacgcgctctgctgcggcgtactggcgctggctatcgcggcgctttgggggtggatgcgcaaaagaggggtcaaactctttttagcgctgaattaaagcgtcgtgtaaaacggcggcaccgcaagggatgtgcggcgccgctgttttaatactgatcgaactggaatatgccgatatgaaattttacatattgggcgtacaatggccataataagggtagtagggctgggaatggccctggagagagatgggtatgaataaaaagaacttggtcgtgcgcaaagcggtggtggggatggcgatccttgctgcgctgcaggtacttgcgctgggggcgctggtgatcctgctgataaacgatgaggatatcgcttggctgggcggcgcgcagggggccctgctggtggctgcgctgctggtgatcctcaacggcatcctcgccgtgcgggagaccatgatgctctggggcagccgcgagcgcaatgagatgctgatcgataccgtgggacagatggagaagctgaacctgacgctgcgcgcccagcggcacgactttttaaaccatctgcaggtgttgcacgggttgatggagatggaggaatatgccgcggcagacgagtatatcggcgatatttacagcgatatcaagcgcgtcagccggatgatgcgcacggcgcagccggccgtcaacgcgcttttacaggcaaaggcgggcgacttcgagcaaaagggcctccagtttgaattgcaggtgggcacccagcttgaacacctggccatcgagccttgggcgctgtgtagggtgctgggcaacctgatcgacaacgcggcagaagcggctgtgagtgcgccgcgcaaagggacgatcctggtggaactgagcgaggacctgaaaagttaccggatcagcgtacataataatggccccgagatccccgcttccctacgggaacagatctttaagcctgggttctctaccaagggagacgagcggggcatgggactggctatcgtttcgcatatcttagaggaaaacggcggcagtatcgcgctgcaatccgatgggaacggcaccactttctctttgcggctgcccaaggcatgacaattgagacgtgtgggtgtatctttggcgcgcctggccttgtgcagatcgggccgcgcctctatactgaatatagatgttggaaaggagggtcatcgatgttggaggcgttaacggccatcgtatggctgcccattgccatgatcgtctttggcgtgattctggtgatcgtggagatgtttataccaggctttggcgtgccgggcaccctagggatcattttactgatcgcgggcatcggcctgcaggccaaatcgctgatggaagcgattttattggtgatcatcgtactggcggtgttgggcgttgccctggcgtttgcattgcattcggccaccaagggcattatatcaaggacgccgctgatcttaaaagcgcgcctgaaccgggagcagggcttccgctccacagaggatatggaggtcttcctgggaaaggtgggcagaactttgaccaccctgcggcctaccggcagcgcggattttgatggcgtcaagctggatgtggtcagcgatggggagtacatcgaaccgggctgtccggtggagatcaccaaggtcgagggccggcggatcctggtgcgggcgcttgccaaagagcaggcttagtgtaaattcgcgccggactgtaaacaggaattgggttgcaccttctcgaatatagagagggacgagataggtttaacgacaaaaagggaggtaccccatatgccaatggaaatcctgtggatcattatcgccgtggtggcggcgatcatcgtcttgaccatcttcttcacctttgttccgctggggctgtggatcagcgccatggcggcgggtgtaagggtaggcatctttacgctgatcggcatgcgcatccgccgcgtggtgccctcgcgcatcgtcaaccccatgatcaaggccgttaaggcggggttggatgtgcagatcgataagcttgaggcgcactacctggccggcggcaacgtggaccgggtgatcaacgccttgatcgccgcgcagcgcgcggatatcccgctggagtttgaacgggccgccgccatcgacctggccgggcgggacgtgctccaggcagtacagatgtcggtcaaccccaaggtcatcgagaccccggtggtggcggcgatcgctaaggacggcatcgagctgcgggccaaggcgcgggtaacggtgcgcgccaatattgaccggttggtcggcggcgcgggggaggaaacggtcatcgcccgcgtaggcgagggtatcgttaccacggtaggttctgctgagacccataaacaggtgctggaaaacccggatctgatctcccgcacggtgctctccaagggcttggatgcgggtacggcctttgaaattctctctatcgacattgctgacgtggatgtggggcgcaatatcggcgcacagttgcagatggatcaggccgaggccgacaagcgcattgcccaggccaaggcggaggagcgccgtgccatggccgttgccaaagagcaggaaatgcaggccgcggtgcaggaaatgcgcgccaaggtggtggaggccgaggccgaggtgcccaaggctatggccagcgcgctgcgcgagggcaagctgggcgtgctggactattacaatatgcaaaacgtggtagcggataccggcatgcgcgattcgatctcccgcatgggcgctcccaaaaacgaccagccgcaaaagtaacccctgagggcggctggggcaaggagcctagataaatggacgttttagtatttatcatcatcgtgatcgtggcgatcgcctcaagcgcggcaaaaaagtcgggcaagaatgccaagaaacagccgccgcagaagggtgcgcgccgcaatccggcggtggatgaacttaacgagctgatgcaaaaatacagccagccggtgcaaaaagaggttgaagagatccggcaggacccggaagtgcagactgcgggcggcaggatcgtcgatacgctgcaacaggccctgcaggatcagccctggcaggctgccgtatccgccgcggtgcaaacggcggtggagaaaagcgcccgcactaagcagacagagcagggcagtctgttgcaggcccagggacagggcagccatatccttggggacgggacccattcgcctgaggggtgcgagacgctgagcacccagggcagggggcctggaggctctctgggagaatcggccatggatattgaaagccgtaaaattgccctggagcgggaactgcgcaggcggcaggacgactatgcgcctccgcaggtagcggcggccatgcaggtgcacggcaaggcgcaggatacggcgatgcagcttgagctggaccgggagaccctgttgcaggggatcgtgctgagcgaggtgctgggtccgccgcgcgggcgtagacccttccggccgggcggctatgccaatatcaagtagaaaaagggcgcgcggcagctttggccgcgcgccttgtctttaggggaaaggtggcgtacccattgaatatccgaacgatggtggcagatgatgacgcggggatgcggctgctgcttaaaaaaattgtggaaaaaacgccgggatttgaagcgcctgtggaggcgaaagatgggctggaggcgctggagctgtttgagcgctaccggccgcggctggtgtttttggacattgaaatgccgctgcaaagcggggtggaatgtgccagacgcattcaggatatcgacccgcgcgcattcatcgtgtttgtaacggcacatgaggagtacatgcgggaggcctttgagctgtatgccatggactatctggtcaaaccctttaaggtcgcccgggtgcaggagacgctggagcggatgcgccagatcgaggcgggcgaatacctgagaagcgtagatcctgcggcatcgatatcggcagggacgcgtctggtcgtcaagcgcaaggagagcgtacaggtggtggatactgccgagatcatcctcatccagcgggaggagcggcaaagcgcgatctacaccgtagacggtcgggtactttcgggcgataccctgtcggagttggagcgtcagctgccgccagaccggtttttccgcagccataaatcttacatcatcaacgtaggcgccgttcagggtatctacccctatggccggtggacctacatcgttaagctacgcgggctccagcaggatgcgctgctcacctttgagcgctatccggagctgatgcggcggatcggcgggtaagggataaagccgaatgtaaaagagatgaaaaataaggagggccttcctgacggaagaccctctttatttcgtataaaatcaaatgcaaagcatagcgcccgccgggaataagtgcttttagcgctccaagcgcacaagatactccgtggttccctcctcaaccttccttttaccggtgaggtgaaagcccctttgcaaataaaaacggagtgttctatcgtttttctccagagcccacaaaaaggtgaccgcgtgatgcgcgatggcataattcaataactgggcgccgatggactggccctgtaataccggctcgacaaatagcttgacgacctcgccaccctcaatgcggataaagccttttaccacgccgtcatcataaacataagtggtttttacgttctcctgcgtacggcggtaattctctaccgcgtttgcaaccgtcaactcgccaaagtagtaggcgtcattccggaacaccgggtaaaagttaaggcggtaattaaacacctcgatctcggcaagccgcgagatgtcctccagggttgccgggcggatattatccatacgcgtacctccgaagatcagaactagataatattatcatggccagagcaaaggcgccttaggtgaaaagcgaagccctgcggcagggcggacctccgccgcgctagtcctccgtttgcggggcggcctgggggccgatatgcacttttgcctccaacaccctgcggccatcggccttgagtacggatacatccaagttttggtactggaaagtatcgccaacccgggggatacgtcccaggtaatcggcaatccagccgttgacggagttgaactccacttcctcgtccagcccggccagctcgaacaggtcgtccacatccgcgctacccaggacccggtagttatcgccgcccaggggttcaaaatcctgaacgacttgatcgtgctcatcccagatctcgcccaccagctcttcgatgatgtcctccagcgtgatcagccccaatgtgccgccgtattcgtccagcacgatcgccatgtgggatttagactgctgaagctgttgcagcagctgtgaaattttgactgtgggcgggataaagggcactgtatacagcacgtcggtcagaggctgatgctcgcgcaggatgagcttaaagaaatctcgctgatgtaaaacgcctatgatgtgatccaggtcctcgtgatatacgggcaagcgcgaataggtgttatccataaatgcggacatgatctcctccggggttgccgtatcggcgataccggcaatctcggtacggggcgtgcagatgtctaccgcgtccaggtcgtcaaattcgatggcgctacggatcaactcgcccgcctgggtatcgatgccgccctcctgctgggcctcctccaccagggtgagcaactcctcctcggttacgcatgtatcgttcccgcttttgaaaagccggcccaatagctttttccactgggcaaagagaaaatttaagggtttaaggactacgcaacagatcctcagcgcaggcgccgagaacatggaaaagcgttcaggatgatccttggccaaacttttaggcgaaatctcgccaaagatcagcaccaccacagtcatcacgaccgtggaaagcgtgacccccatatcgccaaaagcctgggtgaagatgatggttgctaaagaggccgaggcgatgttgacgatgttgttgccgatcaggatcgtcgagagcagacggtcgtagtcctcggaaagatgcaggacaagcgccgcgcgcttatcgccctgcgccgccatgtttttgatgcggatgcggttgaatgtagaaaaagccgtttccgtcgccgaaaagtaggcggacatcgccaccaacgcgactaaaacgagaatgatgatatattgtgtttccaaaaagcagccgtcctttcttttacaaatgttctaacaaatgtgcaaaaaagggcgaccggtcaaagccggtaatcatattcctgcagggctatctggatatagcgcgggcgataaccgccaagggcgctgccattttgcaggataatccccgcgcagtgcgcgctgcagccattaagggtaagaagtgccttcaggtaagggcaaggtcgtccggtactgtcgtcagacatggtacaccatcctttttaaagtgaaattgattcaattataagcgaaggcaagggtttgcgtcaataaaagcgatgcacaaagccctatggacggccacaccgccatagggcattgcaaaggcattacttctttttcttgggcttaggcttggccatggtgaaccggctactcagctccgggtcatcccagggggtgcgcacccgcggatattttttcagcgcctgagcatacagggcctcgcgtttgcgccagataaagtaggcgatcagcagccctgccagatacccgacgataaactcgatgaccaggtagagataaaacgcatccatagcgtaaaagctgctaccataaagggatacgccaatggcgatccagatcaaggccatgacgagaaacagcactgtgccgatggcgccggaccctacgcggacaatgtattttttgagcccgcggcggtgaggctgctcccaggcggagataaagatatcggcgttttcttttgtatcgatcgaatatttggccattagtagattctccttatttttttgcgctagcgtaaatttcctgcagaacccgctgggcgccactgcgcctgggctcgcggcccatggctgtcacatactggccccgattttcccacaggtccagcagggcggctaccagcgtttctccggtcatctcctcctgaggaaggactttagaatagcccgctttttcaaaattctgggcgttgagcagctgatcgccccggctggcggcaagcggcagcgggatcaatagattgggcttgcccaatgccagtaattcaaagatcgcattggaaccagcccgggagagcaccagcgagcagagggcgaacaggtccggcagctggtctgaaacatattcgcattgaaaataacccggcgtgttttttagcttggggtccagtccgcctgcgccgcaaaggtggatgatctcaaaatgcttcagcaattcgggcagcttttcccgcaggcaatcgttgatggcctgcgcgcccaaactcccccccatcatcagcagcacgggtttgcgcccggggagcccggtaaaggccaggccggctttcgcatcgccgttaaaaaggctttctctcatcggggaaccggtatagactgccttggcgccgatggattttgcggtttgttcaaacgatgtgaggatctttttggaaaagggggcacacagtttattggccagccccggcgtcaggtccgattcgtgcagcacagtgggaacgccgcaaagcgaggcgccgattaccgccgggacggaaacgaacccgcctttagaaaacagcacctgggggcgcagcttgcgcatcagcctggccgattgccctacacccttgatgacgcggaagggatcgcgcaggtttttaatatccaggtaccggcgcaatttacctgagctgatggcatggtaggtcacctctttataggcggccatcagctcccgctcgatcccatcagccgtgccgacgtagtggatttcccagccgtcctttaagagctgcgggatcaacgccatatggggcgtaacatggccagcggagccgccgccggtcaatacgattcttttcatacaaagtcctccgttcgccaagtgggtaaatcccttgcgttactattttatttcccgcaggaagcaaaacattccaaaagatacacgtaccttttattgtagcggatttagctgaaaaatcaagttttgggggctgggtggagccagaacgggttgaaaaaaggcttactttcgagtaaggttatggatagcggctgtgccgcgtatagatagattgcagttgagggggatacaccggtgggtgaaaaagaagatatcatgacggcgcaggcgtgccccgaaagggaagggtgggggctggcactgttgctggccatcggttttgcgtttaacattgcggtattcgcgccgcttgaaatctatatttccaacgtatcggagttttggttcggcatggatacgctcttgcctacggtggggataggctttgtgctgacggggatggttacccttttattatgccgttttctgcctgggcgcgggcgcaacatcgcccgctcgcttttcttttcactgctgatcgccctttatatccagggcaatttcctttcaggcggctacccgattatggatggcgaggccataccctgggatgaaatggttgggcgcggctgggctaacgcagcgctgtggctgcttatcctcgcagggccgctggttttgttagcctttgaggaaaaggcgtttcaacttctggtcaaggcaggcacggtattggttttggggatcgagaccgtgacgctgggaatcctattagtcgcaacccctctgcccagcgggacttcctgctatctttctacagagcagatgtaccgtctgtctcccgatgaaaatatcgtggtagtgatttcagatacctttgaggcggcttatatgcagcgcgccctgcaggaatttcccgaacttgtgcaggacttgcgcggctttaccttttatcccaatacttctggcgtatcggcctggacctatctttccatgggaccaatgctgacgggggaagtgttccccgtaggcaaaggcatgcttaacgggatgcagcaaagctttgagagcgatacctgcagggactattatgcgaccctgcacggcgcgggatatcaggtgaactattttacagaagggcgctttttcaggcccgaggatgtggataaggtcgacaacctggtcaatcaatccgtagtgccggatgcggaggcggcgcggcgggttacggcgctgctttaccgctttgcggggtttaaatacctgccgcactttgcaaaaaccggttttgtagtggatacgggagattttgataaagccaaagccatcgtgcaatatccgctttatacgtttgacgatacgaagttctatcataacctcaggtcaaagggcatcgatgccaccgctgaacaaccgcaatatacgctttatcatctggaaggcgtccatgccccttacaacgcggaccgcgatttaaagccgatccaatacccagaggatacgccgatggaagagcgccgctttgaaaagagtctgggacagatcaagatattgaacggactgattggcgagctgaaacgcgctggcgtgtatgagaacacgacgctgattttcaccgctgaccacgggcatcagaaccgttttaatccggtgctgatgatcaagcccgcgggggcacaggaggaattctccatatcgaatgcgccaatctccatggcacaggactttgtgccctttatccaggatctggcccagggcgaagggcgggatgcggcactttaccagatacccgaggatgcgcaacgcgagcggtatgtgtataattacttcagccaggtgggctatggcgcgcgtaacgattgccgtacgacgatcgcactaaatggttttgctggagacatggcgcactaccagattctgcgcgatgagtatgcgcaggggagtggaaacaaacagccgtatgtattgaatacgcctatccgtatccacccggatgcagaaaacgcggtgatcacgggcatcgataaggatcaggcagcctattccaaaacagcgcaagtgtgcctgaacctggcggagccgccgcagggagacttgacgggaacgttgacggtccaaaaaaattatggcggtaagcagcgcctggtcattatggcaaatgatgtgaccctttatgaggggctggcggccactggggatgcgatcacctttccgattccgaaagagcatatacaaaacaatgctttgcaactgatgatgcagtttccggataccgctaaaaagccggatgataatgagggcttggatatgtttgcctaccaatcttttgcctttgatacattgacgctgaatacaagtgaatagtatggcttttaaagagcgttataaaacaataatataaatagggctggtaattgctctagaaagctttataataaaaacagggggaattctgtctgtttttaaccggccctttttatctagcggccggaagttctgcgcggcttgcctttccgcgaaggtagcgggaaacgataggggatgaggtaggcccagactatttacacgatataaataagggcgggggtataaacatatggcgatctttgtgcgtgataagagcttttataaatcgctgatcgcgctggcgatcccgatctcgttgcagaacctgattgcttttgcggtaaactttgccgataacctgatggtagggacgctgggggatgtggcgatctcgggtgtatatatgggctcgcagattcagacgatcctgcagatgttcattaacggcacgggcgcggccatgctgatcctgatcgcgcagtactggggcaagcaggatttagagcgcatccggcggatcacggtgatgtgcattaaaatcgtgctgggcatcggcgttgtggtatcgatcttatccatcgccctgcccacgcagatcctgcggctgctgaccaatgacgaagccgtggttcaggctgggctgccctacctgcagatcatgggtatctcatatatcttcttttgcctatcccagattttgatttccgccatgcgcggggtggaaaatgcaaaagtcggcatgtacgtttcgttgatgtcgctgttcgtcaacatctttttaaactgggtgttgatctttggacacttgggcttcccggcgctggggatcaccggcgcggccatcgccacgctgatcgcccgcatatttgaatgtgcggtcatggtgatctacacgttctttatcgaaaaaacgctgcacctgcgctttgtcgacctgaggcttaaggccggcgtgctgggcaaggattttatcaagtacggcctgccagtcatggcgggggacttggtgtggagcgccaacgtatttgggcagggcatcatcgtgggccggctatccgctgaggccatcgccgcctccagcatcatgggcatgatgaataacttgacctttatctggatcatgggcttgagcgcggcggtaggtatccttaccgggaagacggtaggccgcggcgagtttgaaaagatgaaggcctacgccaagacgatccaggtgatgtttctgattatcggcgtggccagcgggatcttgattttgctgatcaaggggcctttcatctcgctgtacgatatcagcgatcaggcggcgatctatgccgatcagctgatgtgcgtgctatcggtcagcattgtaggcacctgctaccaggccacgggcttaagcggcctggtcaaatccggaggcgatacgggatttgtgttcaaaaacgattccatcttcgtatttttagtggtgctgcccgcctcggtgctggcgctggtgctaaacgcccccgtgtgggtggtgtttgcctgcctcaagtgcgaccaggtgcttaaatgctttgtggccgtggtcaaaatcaaccggtttaactggatgaaaaaactgacgcgggaagtgggttgacctgtgcgattggccggggaggggcttatggcggcccctccctgtttatgcacggcaagcccctttgctggctgatgaaaatttgatataataaaacagtacgatatttttgcgccaggggatataccggcaaaagggggcgagagcaacgcgcatcctatttgtgatccttgcggcggtggtgatgatcgcgtcctttgtgcccctggggttggcctttcgggttatgcgccgccaggaggatgccgggggattccgcaagcggatcatctgggcctttattgccccggtgatcggcggggcggtcattaccggcctggggtttttgatgttataacgaccaacgatggttttaggaggaaacgatggatcattaccgcgcgctttaccggcgcttccggccggcgcgctttgggcaggtactggggcaggagcatgttgcgcgcaccctgcgcaaccaggtggcatccgggcatatcgcccatgcctttttgttctgcggccccagggggacgggcaagaccagcctggccaagatatttgccaaggcgatcaactgccaaaatccccaggagggggagccctgcctggaatgccccacctgtacggcgggggaaaacaatatggacgtagtggagatcgacgcggcctccaacaacggcgtagacgagatacgcgacctaagggataaggtgcgctttccgccctctatgggcaggtataaagtctatatcatagacgaggtgcacatgctctctcccggcgcatttaacgcgttgctcaaaaccttggaggagccgccggcacatgcggtttttattttggccacgacggaggcccagcgcctgccggcgaccattgtatcccgctgccagcggtttgatttcagacgcatcgatgtggcgaccatggtaggccgcctgcaagatatgacccgcgagctggcggttaaaatatcgcccgaagcgctggcgctgatcgcccgcgctgctgaaggggatatgcgcgattgtctgtcgctgctggaccagagcctggcctttagccccgatggggtagaggaaaaagacgttgtgcagttgctgggtgcggcagaccctgcggcgctctcgcagatggtgcgcgccatgttgcacggggatgagcgcgggacgatcaccagccttgccgatctactgtcgggcggggcggacctgggatttttgatcaaggaactggccgaggagctgcgcaggctgctgctgtgccagctgctggataagccggaacagctgctggtgtgcgatactcagacggtagaccggctgcgaaaagagggaatgggcatcccgcaggcggcgatcatgcgggcgatcgagctgctgctgcactgtgaggcggagttgcgctttgccgcccagccccggctgatcgccgagtggacgctgctgcgcatctgccgggccagcgatgaggattctatcaccgcgctttgcgaacgggtggcgcgcctggaagaggccctgcaaagcggcagttttgtgccggcgggcgatgtgccgtctctgccggtgcaggatgcaccaccgccccctgacgaggcgccgccccaggcggatgagggcgcgctgcccttgccgcaagaggagccggcagtagccgaaacgccatcggccccgagcgcaccggcgcagccgctggggcaggaccaggtgatggaagaattgagccggcgggtcaagcgggagaagatcgccctgtttagcgccctgcaaaagggcagcttttccggcgtggagggcaatctattcaaactcaactttgccccggagaacgagatctttgccaatatggtggagatggaggtcaaccgtaaatttatcgagggaatcttacaggaattgctggggcaggaggtgcgcctgcagtgtaagatcgtggaggaaaaaaaggaccccaagcaggcaaacccggccttgaaacggctggaggagctgtttggcaaggattcgatcgagatcgtagaagattagtagaggcgaaaagcccgaaaggagtaaggaactatggcaagaggcggatttccgcgcgggggattcccgggcggcggtatgggaaatatgcagcagatgttaaagcaggcccagaagatgcagcaggatatggccaaagcccaggaggagttggcccaggcggagatcgaggcatccgccggcggcggcatggtaacggtgacggtgacaggggacaagcagcttaaatctatcgtcatcaagcccgaggcggtagaccctgacgatgtggaaatgctgcaggacctggtgctggcgtcagtgaatgaggccctgcggcaaatggacgagttgacccaggagaaaatgggcaaggtgaccggcggcatgggcggcatcccggggcttttttaaatgcagacccatattgagccgatcgcccgcatgatcgaacagctggccaaactgccgggcataggcagcaaaacggcgcagcgtctggctttcttcatcctgtcgatggaggaaaatgaggtgcgccagctggccgaggcgatctatctgggcaagaaaaaagtacatgcctgcgccgtatgtggcaacctgaccgaccaggacccctgcgcgatctgtaccgatccgcgccgcagggacgacgtgttgtgcgtagtctcggatgcgcgggacctgctggcgatggagcgaacgcgggagttccgcggccgctaccatgtattgggggggacgatctcacctatggagggcattggccccgatcagctgcgcatccgggagttggtcacccgcatcggccgcagcgaggtcaaagaggtgattttggcgaccaacccggatgtggagggggaggcgacggccgtgtatctggccaagctgctcaaacccctgggcgtcaaggtctcccgcatcgcccacggcgtaccggtaggcggcgatctggaatataccgacgaggtgacgctggggcgggcgctggagggccggcgcgagatgtagagatggataaggcgcatcaagcgctttgccaaatatattaaggggatggaaagaatggataagttgaaagctgcatgggtgggcttccgccagccggatgcagacccgtggaaggtttatgagcgttacgccgccatcggctaccatggcatggatggcgacctttgggagatggaaggcgaccgggtagagaacctgaagcattttaatgacctggggctgcaggtggtttccagctgggccgtgcggggggatatgaaagaatttgccgcggacgaccagaaaatcgccgaggttatcgagcgggcgcacttttataacctggacgcggtgaccatgggtggcatctcggtcatctccagctttaactcttattatggcaacaacggtacgtacgacgaactgatgtacgatatcgagggcatgaacgccgtgatcgagaagctgggccgtgaagggatcggcctgctctatcacaaccattatcaggagttcaccgtcagctacgacggggtatcggtaatggattatctgctcacggacgtggaccgcaggctcaagctcaagctggatgtgggctgggtatgggttggcggcgtggacccggtagcgtttatggagaaggccaaggatcgcatcggcctgctgcatatcaaggatttctatgaccaagagatcccccgccacctggtcaaccagaaaccggagacccgcatcggctttaccatgctgggcacgggtaaggtggatatccagggctgcctgaaaaagggcgtggagatcggccagaaatgggcgatcgtggagcaggataccatgcgcaacctgacgatggaagaggacctgaccggctccttcctggcgatgaaggaaagcggatacgtggaataaaagggtacgataaaaggcgcgctgccccaacttgggagcagcgcgcccttcttttttaccgcttataggccggcctgctggcgtgcctgtgcgcgaaaggcggagggtgtgcaaccacagtgcttgccgaaaaccttggcaaaataattctggtcggaaaaaccgcagctttgagcgatctggcggatcgaatccttgctgcctgagagcaggctgcgggcatggcgcaggcgaacctcggtcaaatacgcgttgatcccctgcccgtaggcgcgctgaaaagcgcctactagcgtgggcttgctgcaaaaaaactgctggcttaaatgatccagcgtgatggaacgggcaaagttttgattgatgtattggcggatatcctcagccaggtttttatcggccagattcatgcggttgctcagcgtgatatacgccgcgcagatattcattagtgcaatgcagctgctcagtttatcctgtgggatatcgggtattttatagacccgttgttccaaaagtgcgccgtcttccacataaggggctgcggtgcgcatgataggtgtccggtcggtctgggaggaatccaaaatctgtcccatcatcaaaaaaccgctgagaacgccatattgataaagcggcgctacggcctcgtgcagcccaaaggggcagcgatagatgtagatctgcccctggctgcggacgatctcaaaggcgacggcatcctgccggcggcaaaggtgatcggcatgtttattttgccgtaccagcgcgcaaaaggggctgagcgcatccggataggcggcgatctctcgtaaatgcgtatcgtaaagggacatgcggcatccggaaatattgtaaagctcctttagcacggaaataatctccgcatcctgttgcataaccgcacctcctatgggttgattggtaagatcactaaaatatatttatgattttactaattattatccattattctctggaaaaggcaagtgctattttttataataacagtagcgcaacgaggagaggggctgtgcaacaggatggaggaggctttgcgggctgccgcgcattttgatttgagcggccgtgtggcccaggcgctgccctgggggcagggtcatatccaccgaacttttcgggtagaaacggatgggggtaaagagtatatcctgcaaaagatcaataccgccgtattcccccagccgggaaaattgatggagcacattctgcgcgttacgcggcatatggccgatgcggcgggcaaaagcgttttctgcgtaagtctggcaagggatgggcatccctggtggcaggatgagtgcggcggggcctggcgggtctatccgctgatccccaacacctttaccctgcaggagccgcgcacgccgcaggatatgctggaaagcgggcgggtattcggccgttttataaaggacttaatggggatagcgcctaagacgctctacgtcagcatccccggctttcacgatacgccggcgcggtttgacgcgctgcgcgccgcggtgcggaaggatccgaagggccgcgcgcaattcgtaacggaggagctggaatatctgtatagctgcgaggcgtgcgcctgccggctgtatcaacaggccctgcaagggcagctgcccctgcgcgcgacgcataacgataccaagctcaacaatgttctttttgaccgctccagcgaaaaaggggtatgtgccgtagacctggacaccgtgatgccgggcctggcagcctatgattttggggatgctatccgctttggcgccagcagcgccccggaggatgcgcaggatacccgggcggtccatttggatttgccgcgctatgcggcatatgcgcgcggctttttgcagggctgtgcggatgcgctgacgcatgcggagctggattcgcttgctgaggggccgttttccataaccatagagcaggccgtccgttttttgacggactatattttgggcgatatttattacagggtcgaccgcccggggcataacctgcagcgctgccgggcccagctggccctggccagggacatggaaaaaagggcggcgcggatgcgtgatgtgatcgttgagttgacggatagggaggaaaactagatggcgattttggtgaccggcggcgccggctatatcggcagccatacctgcgtggaactattaaaccagggttacgaagtggtggtggtggataacctgagcaactccagccgcaaggcgattgcccgggtagagcagataaccggtaagagcctgactttttacgaggaagatctgcttgattatgcggccctggaaaacatcttcagccgggagaagatcgacgcggtgatccactttgccgggctaaaggcagtgggcgaatcggtacagatgccgctggagtattaccacaacaacattaccggcaccttgctgctatgtcagacgatgcgcgagcatggggtgaaaaacatcgtctttagttcctcggccactgtctacggtcggccggagacggtgccgatccgggaggattttccgctgtcggccaccaatccgtacgggcataccaagctgatgctcgagcagatcttgaccgatctgtacacggccgacccggaatggagcgtgatgctgctgcggtattttaacccgatcggcgcgcacgagagcgggatgatcggcgaggatcccaagggcatccccaataacctgatgccctatattacgcaggtggcagtgggcaagctgccgcatttaaacgtatttggcaatgattacgatacgcccgacggcagtggcgtaagagattatatccacgtagtggacctggcgctgggacatatcaaggcgctgcaaaagatggagggcaggccgggggtaaagatctacaacctgggaaccggcaagggctatagcgtgctggatatggtgagcgcctttgaaaaagccagcggcaagccgatcccctataaaatcatgccgcgcaggcctggggatattgcgatctgctatgccgaccccgccaaggcgcgggaagaactggaatggaccgcccagcgcgacctggcccagatgtgcgaggactcctggcgctggcagaagaacaaccccgatggctatggcaacgagtaaagaaagaaacggcccgcagttatttgctgcgggctgtaacttatttgtcccaacgccagagaactacctgctggtttagtaacatttgcaggttaagggagatggaggggatggaccataaaaaaggggcgaacaagaagttcaccccactattgaatacatctctaagtcatcccggctgatcgtcctgcatcatctggtcctggtgccgggtcagccagatactgaagataaccagcgccacaatgggaaccagccaggagcccacccccgggatgctgatggcgatcagcgccgcgggatagaatagccagcgagccgtctgcttgatacggcgcgtgcgttcggaaggcgtttccaggtctttttcgtctaaacagaacaataggcaaaaatcccggaggataaaggcttcaacgcagcccagtattcgggcggagatctctaatccgtcgcggtgagacaggccgatgataatataacaggccaccagcacgcagatacggctgatggagaaaagcaccatttgtaagcccggccccgcccgtgtaacggccttgactccctgggccagcagcgatacggccagcaaacccaggtaccagttccataactgctggtaagaaaagacgacaacctcgccccggtagtaattataggaatccaccgccgttgcgtcggcgctgttcataaaccatacgatatatcccgcaagcatcgcccaaagcagcagcgataaatagtccggatgcctgctcttacgcaatcattccacctccaagccggggtataccggctactgcaccaatgcctttttgctgcacggggtagaaagtaaaaaagattctactcaatagcaaacgattcaaaatgacagggcgccataattgtacaaaattatatcaaattatttttatcgtatcacatttgaggtacctttgcaagatttgcccgcttgccgcaaaagggtagatgcgttacaataaaaaaagatgtgaccctggagatggttgtgatagagaaataattaaggggtcagttttggaggatacatggaatattgccgcttacagctggatccttcgcgcaaagagccgctgtaccgccagctttacctggctatcgctgcccagatccgttcgggaacgctgccccagggagagaagctgccgggtaagcgcgccatggccgggcagctgggcgtcagccaaaataccgttgaaacggcttatgagatgctgttgagcgaagggtatctgcgctcaaaaccgcgcagcggtttttatgtgcaggccatgcccactcgtcctcaggtaaccgcgcagggacggccggcctgtccgccggaacggccagctccgccacaggctgcatacgattttgccacatccgccgtggatacggcctgctttccctatgctacgtgggcgcgcatcacccgtgatatcttcagcgaccatcgcgagctgctatcaagaggggagccacagggtgagatcgagctgcgcgaggagctgtgccgctatctggccgaaaaccgcgggatgcaggtagaacctgcacaggtggtcataggtgcgggagtggaatatctttgcgggttgatcgtgcgtttgctgggcggaggttgcacttttggcctagaggagccgggctatcagcgcaaccgcgagatcatttataaccagggctgccaggtttgcgccctgccggtagacggcgagggtatcgatatggcggcgcttgacaagagcagcgcgcaggccgtatatgtgacgccggcccaccagttccccacgggggtgatgatgtccgccgcacggcggatggcgctgctgaactgggccgaggcggcgcaggggcgcatgatcatcgaggacgattacgacagcgaatttcgctatgaattccgtcccgtgcccgccctgcagggcttggacacgggcggcagggtgatctacctcaataccttttcccgcagcctggcgccggctttccgcatggcttatatggtattgccgccccagctgctcaagcgttaccggcaggattttgccttttattcctgcacggtctcccgttttgaacagcaatgtctgtgccgctttattcgggatgggcattttagccggcacttgaaccgggcgcgcacgctataccgcgcgcggcgcgacaccctgatgcaagagcttgagcgcatggcgcccgagggcgcgctccagttttccggaggccaggcggggacccacctgatcgtaaccgttgcaaacgggatggatgaggctgctttggtcggcgcctgcctcagccagggggtgcgggtatatgggctcagccagttttgcgcgcaggacggaacggcgcatagcgcaagcgttgtgatgggatacgcgggcatggagcggggccgtatcgaacaggctgtgcggcgtatcggcaaagcctggtttggagattagatacatttgtcaagaatctgtcaaataaggtttgacatttgacagattctgtccatataatataaggagtaaaatttgttttttcggcaggataccctaaaataggatggatgaggggggatagcgcgtgcacaagaatcggtggatccattggatcgctctgttcgccgtgctggcgctgctgttccttcccatggcggggaatatggatttaacctccggtctggcccatccgcagcaggctggtgctgctgcgcccttgacgcaggctgcgctgcgcaccgggggcgtggtgaccgctgacgaggtgcttttgccccgtgctgcggagagcttcggtttttccgggctgcgtctgatcctgctatttgtggctatcgtagcgctatcgctatgtatgttccgcatgttggtgtgctaccggctggggcattctcataccgctttcaaatcttctatcatcgcccggtcgctgggcggacatgcgcctccaaaggcctttttgatctaacttttttacacaacctcatacgcggtattttgtgcggctggactaggcggcagcattttgccatatgattttggtaggctgtctttatctcctgttaccgttttagccgtgtatggccaaaatttagcgttagacgtgaaaaggatgatcttgatgaattgggcgctttttgcaattctgatttccgctttagcttttatcgtagccggatatttttaccggtgggtctcaaaattacccgttgccgaagggccgctgcgccacgtggggatgctgatccgaaagggcgcgttcgcctttcttaaacgggaataccgcatccttgcgatcttcgtgggcgttgttgcgctgctgctggtgctgtttttccccatgcctttttggatgggctcgatcctggagaatctgggcatggctgccgcatacatccttggctcggtattgagcgcgctggccggggtgatcggcatcagcattgccaccatcgccaacgtacgcgcggcaaccgctgcgcgccaggggctggccccctcctacatggctggcttccggggcggcgctgtaatggggatggcggtggtgggcagctcgctgtttggggcggctgtgctgtaccttttgaccagtgaccccaatatcgtgctggctttcagctttggcgcaagctccctggcgctgtttgccaaggcaggcggcggtatctttaccaagacggccgatatcgccgccgacctgaccggtaaggtggagctgggcatcccggaggatgacccgcgcaaccccgccgtgattgccgataatgtgggggacaatgtgggcgacgtggccggcatgggcgcggacctgttcgactccaatatcgcggccatcgccgcagccatggtcatcgcgctgccgcttggccaggtagacctactgttctgcttcggcgcgctggggcttttggcctccatcattggcgtgctgacggcgcgggtgggcaaaaagggcaacccgggcgcggcgctgaaccgcggcacctatttaacctgcgggatcttcgcggttctgacgtttgcagcttctatgatatatcatttcgatctgcggctgtggggcgccacggtggtagggatggtcgccggcgttgtgatcggcctgaccagcgactattttaccggcgataaccgcaagcctgtggcgcgtgtggcccacgcctgtgagagcgggccggcctttaccatcctctcgggcatttcctacgggctgatcagcgccctgccctccctggctggcatcggcgcggccgcgctgatcgcctttaagctttgcgagcccatgggcgcagggtacgcaatgctgggcgtatcgatgagcgccatcggcatgctggctatcgtaggcatgatcatttccaacgacgcttacggccccattgtggataacgcgcggggtgtggctgaaatgggcggcctgggcgaagaagtgttggagatcaccgatgaactggatgcggcgggcaatacctctaaggccatcaccaagggatttgccatcggcgcggcggggctaacagtcatcgcgctgctgggcgctttccgcgagatcgtgtacaatgccacagggcagacgctggtctttgacatgatggatccgctgatctttttcggcatgctgatcggcgcggccatcccggcggtatttgccgccatgctgatgatgggggtcaaccgcaactcacaaaagatggttgccgagatccatcgccagtttaataccattccgggcctgaaagagggcaaacagggcgttttgccggactatgaccgctgtatcgatatcgctacggtaggcgcggtgcgcgagctgatccccgcggggttgatggccatcgtcgccacgctggtcgtaggctttatcggcggggtggccgcggtagggggctttctggccggcaatatcgtttccgggctgctgctggccatgctgatgagcaacgccggcggcctgtgggacaacgccaaaaagtatatcgaagccggacactgcggcggtaagggatcgcccgcgcataaggcggcggtcatcggcgatacggtaggcgatccgtttaaggatacggcagggccctccctcaacacgcaggtgacggtcgtctctctggtatcctctctggcggcggcgctgtttatcgccatatccatcttctaatacaaaggggaaaatatgaatcttgcgtttttgatcagtatgctgctggtgttgggcgtagtctttgtcaacggttggacggatgcgcccaacgccatcggtagcgcggtagctacaagggtgtttcggccccgtacggctatcctggtggccatgatcttcaactttttaggcgtgctgctgatgaccgctatttccacgcaggtagccgacaccctgtcgaatatggtggatttttcctccgcctcccatagcgatgcgctcatcgtcatggctgcggccatgtttgccatcgtggtatgggccgtggcggcctgggcctttggcatacccaccagcgagagccacgcgctgatcgccggattgacgggcgcggcgatggcactgggcgggatcggcgccatcaacatgggcgaatggcaaaaggtgctaatcggccttgccgtttcctccgtgctgggttttggggccggctttggctttgccaagctgattgcccggctgttctatcgggcggaccggcgcaggaccgagcggttttttactgcgggacaggctgtttcagcctgtggcatggcgtttttgcacggggcgcaggacgggcaaaagtttatgggcgtgatgatgctggcgctgtttttaaatggcatggtacaaaaaaatgccggcggtacctttgacatcccgctgtgggtgatggtactttgctcagccgtgatggggctgggcaccttggtcgggggctggcgcatcatcaaagccgttggatttgacatggtccatctgcaaaagtatcagggctttgcttcggacctggcggcgggcggatgcctgctgctcagctcgctgaccgggctcccggtatctaccacccacaccaagaccacggcgatcatgggggtgggcgcggcgcgccgcttttccagcgtgaactggggcgtagcccgcgagatgatattggcctgggtgttgacttttccgggctgtggcctgattggttatgggatggccaagctgtttttgcacttgttttagctgtgaggattggggaggtaagggatgaagatcaaaaaagatgcggattattttgaattgctttcgaaaatggtcgcctgcacgcatgaggcggcgcgcaagctccacgaactggtggtggtgtacgaccaggtgccggagcgctgcggagagatacatgatattgagcacgcctgcgatgacctgctacatattctcttaaagaggctgaatgcggcatttattacccccattgatcgagaggatctactggcgatcgccaaggggatcgacgatattaccgatgccatcgaggatgcggccaacgcgtttgatatgctgtgcgtagataccatacgcccgggcgcggtagagatggcggaattgattttacaagccatggaggcgttggtcaaggcagtgggagaatttgaccagtttaagaattcccagaagctgagtacttatattgtagaggtcaactccatcgaggccaagggcgacacgctgcaccgccacctggtaaaggatctgttccaccggggcgatccattgaccattctccagtggaaggagatctttgacatcatggagcaggtgctcgatgcaggcgaagaggtcgccgatcttctagaagccatggcgatgaaaaaccggtaagtttaagcccaccaagcctttttacccggtgctcctccttagcacggggtaaaaaggcatgaagccgcacccctatggggcgcggctttttttatccccttttcgggacgcatgcggagcgaatatcgcaaggagcatatgcataggataggacaaggcgggaagatggggggattgttgatgggtttgagtattccctatgaggcgatcatcgcctatgcattgggattggttttgttgtacgtagtcggctatctgctgctggtgccgtttaaaatggtgctgcgttttatctataacggcttgctgggcgggctgatgctctggggtttaaacgtggtcggcggctttttcggcgtcaatatcgccatcaattttgtcaccgcgctgatcgcggggtttttggggatacccgggatcatcctattgctgatcttgcagatgatcttataaaaaagaaggtgcccgccggggcatcttttttttcatcgatatttttccatgggttcgatgaaaaaccggcaaatgggtacaataaaaaggattatcagcctcccttcccgaataatgcaaaaaaagcatgaaaaggggcgtaggggcatgcaggtttcctgggcggaattattggcgcagatcgacggatgcacgaagtgtgggctttgccgcgcgcgaaccaaccctgcgccgggagaaggggatctgcaggcccggatcatgtttgtaggcgaaggaccgggcgcacaggaggatctgcagggcaggccctttgtaggcccggcggggcaactgctggataagatgctggccgccatcgctttaaaccgcgagcaggtctatatcgccaacattgtgaagtgccgtccgccgggaaaccgggtgcctacgccggatgaggccgccgcctgcctgccctatctccgggcgcaagtagggctggtatcgcccaggataatcatttgcctgggggccactgcggcgcgctattgcctgggcggggaggtacgcatcacccgggacaggggcaagtgggtacagcgcaagggcgtatggatgatggccacctatcacccggcggcgctgctgcgcgcaccggaaaaaaagcgggaggcctggcaggactttaagtccatccgggaacggcttagagcaatggaaatggaagaagaggagcaagatgatggcaaaagcgcaaacgcagagccgggagaagatacatgaacagatccgccaggcctgcgtggattttattgagcagatctatccggatcaatccaagatcgtagtgttcggagaggggaatttaagcgccaagctgatgctggtgggcgaggccccgggcgaacaggagaccctgcgccagcgcccctttgtgggcagcgcaggaaaaaacttggaccggtttttggaattggtgcatttggagcgggaagcgctgtatatcaccaatacggtaaaatttcgccccaccaagcgcaatgaaaagaccgggcggctctccaaccgcccgccggagcgggaggaggtgctgctgtgcacccgctttttgcgggaggagatcaacctggtttccccgcgggtgatcgccagcctgggcaatgtggccctgcgcgcgctagcgggcgaccggcggctgaccattggcgccgagcatgggcgcccgcggccctgccagatggcggggggcggggtagaatttatcctctttccgctctatcacccggccagcgtgatctacaataacaagctcaaagaaacgtatgagcaggatgtggcacagctggcacagtatttaaaagaacgcgtgtaaggctgatccgcccctcaaaggggcggattttgatttgccgcttgactctcccgctgggggaggggataaagtggatttgtcggaacgggaaaggggcgcgaagcgatgtaccggatcggagaattttcacaactgagcaagaccaccattaagaccctgcgctattatggcgaggtggggctgctcaaccccgcttttgtggacgcacagagcggttaccggtactatactacggagcagctgatcccgctgcaacgtatcgtcgcgctgcggcaggcgggcctgggcgtggaagaggtgcgccagatcatgtccggagcggacgcacagaatacgctgatgcgccgccgcgggcagatgcaccgcgaactgcagcaggtccagcgccagctggcccggatcgacgcattactcaaaagcggcaaggaggaattttttatgaagtatcaggcggtcatcaaacaagtgccctcttacacggtgtactacaaacagggccttgtgcccacgcccgcgcagctggaggcatttattctgggctcggcacaagaatgcctggcggccaacccgggcattacctgcgtggaaccggactactgctatgtctcctatttagacccggagtataaaccggagaacatgctggtggaatatgggcaggcggtcaacgcagcggggacgcaaacggataccatcaagtttaagacgctgcccgccacggaggtgatctccgtttaccaccagggcccttacgaaagcgtgggcagcgcctttgcctttgccctcaactgggcgaaagacaatggctatcggacggcaggccttccccgggagcggtatatcgacggtaagtggaatcaaccggacccagaaaagtggctgacggagattcagattccgatccaagcggaagaaaagtaggagagaaccatggtgtcacatatcacgaaaaagtgcgctataatatatcttgcgtgatcgatcggcgctgctgttggagaaaaatatcccttcgtccagcgggataaatgtgtgccataaaagaaaaaagcccccgcttaagcgggggcttttttgcaatctttttacacatcaaacaggccggcgtgatcccgcagggcctttgtcaccccgccttcatcattgctggccgtctgatagcggcagatggccttgatctccggctgggcgttggccatggcaaaactgtgggcgcagtacgtcagcagctcctgatcgttaaaataatcgccaaaggccatgacctgttcctgatccagccccagccgggcgcacagagcctgtacggcgctgcctttgttgacacccggattggtcaggtcgtcccaatggcggccagataaggtgactttaaagcgcccttcaaagtccaacaggcgggcgtagctgttctgtgcggcgggcgcatcgtcaaacacggcgatgcggcagatatcgtcatcgatgggggcgcagagatcgtccacaaattggatggttttatagtaccggcgggcctgcgctaaaaagtttggctggcggcaatcggtataggcggcctttacgccgcaaaacaggggatatacgcccgccatcccccggataacctgcaggggtgcgccgcagttttgcgcagggatcgcgcttttgtagagcacatggcccttttccataatcaacgcgccgttttcggcgatataggtcagttggttttccaggtgagaaaaatagctgcggatattatcgtattggcggccgctggcgatggcaaaccgcacgccgcgccgcagcagcggggcgaccacgtcgaaaaaatccggcgggagctgtttttggctgctcagcagcgtgccgtccatatcggctgcgatcaattttaccatagcgtgtctccttctcaggcgttcagggcgatgccgctttcccggcacaggttgcgcacgtgccgcagcgcctcataatactgatcgcgccccgacagatgctcgattatgaccggcagatcgggatcttgcgcctcgattttttgcaggtaataggggaggtccacctgaccgcggccggggaccacctcttgcgtggcccaggccatgccggggaggatgcgcaggtcctttacatggcagctgcggataaagggccccagtttttcaaagcaggcatccatatactcgcgctggccaaacagccggcgcggggtgaacagcaggttgcagatatccatatggaccttaaaggccggccggtcgatctgctcgatcagcgatagatagctctccggcgaatcgggcaccatccattgcatgggttccagcgcaaaacaagtatgctggggctgcaccgcgtcgatgatctcctgcacggcgcgcacggccagggccacgtgctccggcgcgaaattctgcggacaaggggcgtaccatatgccgcccgcgctgccggatacgttgacgcagcagcgggcgtgcagccgctcggccagggccagacgcagcttgccctgctcaagggccatcatccgctccttcgggtcgggcgagacgggattgttccagatgcccacctcggccaccacgaggcgatgctggtgacaataacgctcaaacagggaaacgttctcctcgctcaaggacgcctccgccgggtagaccaccgcacgatagccaagcgataaattgacatccagatattccgccatggaagagacctgcccgtagggaaacattccgcctacatgcatacctgcaccctcctttactttgcctttattgtatcatgtttggccagaggaagcagccccgtagggtgcgacaaatgcggtataaagcggtataataaagaaaagatacgataaaggcggaaaccggctatgtttgaaaacgattacattatgcgccagattgaggggttgacccgttttttggcaaaagttctgatgcaaaaagatatgggaagcgcggatgtgatcgacgagcagggacatctgaacccgggcaactttttgctttaccggttgcagggcatggtcgggcagggcgcgataaacgaggcggaggatctgctctttgatacgatcagggccgagccgcgggaggcgtatttgaaggtagcgatcgacttttacagcctgctgcagggaatggaggatgatgccttaaaagcggcggattttacccggcaggagatcgccgaagggctgcgggacgtgcgcgcgatctacggcgctgacggcacggatgcattggtttaaatggataaaaggaagggttgtccggcaagggaatgattcaaagcctccattcaaccacctcttcaagccctttgcgcgtgcgcgcccggggaaattcatcaggatagcccaaggcaaccgctgctaccagctgaccaccgctgtgcagccattcgcataattctggatacgcaaaatatatatcacaaatccacaagctgccgatccctctgtctgtagcggcaaggaccatattctctatggctgcaccgatggattgaatattgcagatctcagcgatgcgctcttctgtagttagatcctccaaaatacttttgcccaatgaatgagaaacaaatacgatgaccggagcctccgctatgatgtccacggtatattttgccccggcaatatgctgcttgctttgctgcagtaaagtataatcgtgctcttcccttaaaatcccccggcgaaaggcagacagcatttcttcttttgcccgcccctgtacgaccgtaaatttccacggctgccggtttttagaggagggggcctttattccgctttggatgatcgcctcaatatcctctttagatattggggtatctaaaaattttctgatgctacgtctatcataaacggctgaaatcattttttatatcctcctaagaataacttaacgttgttctctcgcattttaacacaatttaaggattgggctgacccaaagcggacggaaagatgatgaaacggcatagccatttttggctatgccgtttgtatcatttccgattagggatgtgcctccctgttataaagcgcgattggaggtgggaacggatcactcctcatcctgcagggcgtcatacccctcctcgccggtgcggaccttgaccacgttctccacatcgtatacgaagatcttgccgtcgccaatgtggccggaatacagtacccgcttggccgcctcgatcacgctgcgcaccggaaccttgcataccacgatgtcaacctgcaccttgggcagcaggttgatatccaccgcaacgccgcggtaatactcgctgcggcccttctgcatgccacagcccagcacctgagtgaccgtcataccggtgatgcccagttcgttcatcgcggccttaaagggctcaaaccgactctggttgaagatcagcaccaacttggtcatcttgggcgtcccttcggcaggcgcatgtccggtggaagaataatcctgcactgggatggcccgttctaccgggacagcaggtgccgagacagcggcggctgtcgctgcgggcatggccacgccgtcgcccgtcaggctggccggcatgggcataaagtccgcatagctggaggccaggccgtgttcctcaatatccagacccgcgatctcctcttcgggcttgacccgcaggccaatggtctttttgatgatgaaaaagatgatcgtcatggttacggttacccaggcgatgaccgagagtacgccaacgacctggatgcccaggaactggaaaccaccgccgtaaaacaggccgccgtcggtggccagcaggccagtcaaaatcgttccggccgcgccgcagatgccgtgcacgccaatggcgcctaccgggtcgtcgatcttgaggaccttatcgacaaactcaacgccaaatacgatcagcacgccggccaccaggccgatgatagccgcacccaaagggcttaccatatcgcacccggccgtaatggctacaaggccggccaacgcgccgttaagcgtcatggaaacatccggttttttgtagcgcacccaggtgacgcacatggtagtgaccgcagcgacggcggctgccaggttggtggtcataaagatcgaacccatgctggtcaaggtatcgtcgcccgtggcacttaaggtagaggtgccgttaaaaccaaaccagcagaaccacaggatgaatacgcccagcgcgcccagggtcaaactgtggcccaagatggctttaggcttgccgtccttatcatacttgccgatacggggccccagcatcttggcgccgatcagggccgatacgccgcccaccatgtgcacggcggtggagccggcaaaatcgtggaagcccatctcgctgagccaaccgccgccccagatccaatggccggatacgggatagacgatcaggctgatagcgatggagtacagacagtaagaggcaaacttggtgcgctcggccatggcgccggaaacgatggtggccgccgtggcgcaaaatacggtctgaaatatcatgaacaccggggtgggaacgctcaggcccaggaagctgtaatccgcctggctcataaaatcgaaccagccgaaaaactgattgcccgcgccgaacatgatgccaaagcctaccagccagaagatcggcgcgcccagggaaaagtccatcaggttcttcatcacgatgttgccggcgtttttcgcccgggtgaaaccggtctctaccatggcaaacccggcctgcatgaaaaataccagcgcagcgcccagcaatacccaaatggtatcagcagatgaaaacatacaatccctcctctaaataataagcgtgcatcccgcttgggggccatgagcagcaaactgctaccgcaaggccttgtttcgggatgcacgcctttgtgcatcgacgatatttgattgcgcttacacgctgaacagcagcgtggtgtaggtggggaagggccagtagcgatcccccaccagggtctccagctcatcggctaccgcgcgcagctcttgcatggcggcaaatacggtatcccggtaatactgggcacaggccagcggatcgctggagcaatgcttgccatccagcagtgcggcatccaatgcttcggtctttttataaaagcaggccgccagatcgcttagcttggtcaacagcgccttttccacttcgcaggagatcccgcccagggcctttttggccgccgccgcttcgctcaaatccttgatgtaggcacaaacagaaggcagaacgtcccgcttggccatttccagcatggtcagcgcttcgatattcagcgtcttactgtagccttccagcaaaatctcgtaacgggcgcgcatctcttcctcggtaaagatcttgtggcgctggaaaagcgcgatgttttcgttactgataaaatagggaagcgcctcgggggtggatttgaggttgagcaggccacgcctttgcgcctcttgcacccattcatccgagtagttgtttccgttaaaaataatgcgcttatgttcggcaatggtctcgcggatcaactcgttcaggtcatgggtaaagtcgctggaggtctccagcctgtcggcaaactgcgccaatgcgtccgctacgatggtgttgagtaccacgttgggcccggagatggagaaggtggaacccagcatgcggaactcaaacttattgccggtaaaggcaaaggggctggtgcggttccggtcggtagtatcccgggcgaaacggggcagggtgtgcacgccgatcttcatttccaccctttcctgcccatcgtatgtggagccgctctcaatggcctccagcacatgggtcagatcctcgcccaagaacatggaaacgatggccggcggcgcctcgttggcgcccaggcggtggtcgttgcccgcgctggctacgctgatgcgcagcaggtcctgatgctcatccaccgccttgatgacggcggaaaggaacagaagaaattgcgcgttttcctgcggggaatcgcccggttctagcaaattcagcccagtgctggtggatatggaccagttgttgtgcttgcccgagccgttgaccccggcgaagggcttttcatgcagcaggcaggctaagccgtgcttatccgccactcgtttcatgacctccatggtcagctggttatggtcggtggcgatattggtggtggtaaagatgggggccagctcgtgttgggccggcgccacctcgttatgcttggtcttggccagtacgcccagcttccaaagctcctcgtccagctccttcataaaagcggaaacgcgggggcggatggtaccgaagtagtgatcctccagctcctgccctttgggcggtttggcgccgaacagcgtgcggccggtaaagatcagatccttacgcttttggtaggccgccttatccaccaggaaatactcttgctccggccctaccgtggtgtagacccgcgtgccgacggggtggccgaacagccggaggatgcgcagcgcctggcggttgatagcctccatgctgcgcagcagcggcgtctttttatccaacgcctcgccgccgtacgaacaaaaggctgtggggatgcacagcgttccatctttaatgaaggcataactggtggggtcccaggcagtgtagccccgcgcctcaaaagtggcgcgcagtccgccggaggggaaactggaggcgtccggctcgcccttgaccagctccttgcccgaaaactccatgatcaccttgccatccccgcagggggagatgaaactgtcatgcttttcggcagtcacaccggtcatgggttggaaccaatgggtaaagtgcgtggctcctttctctacggcccaatccttcatggccgtggccacgacattggcgatcgtcagatccaggctcttgccggcatccatggtctttttcagcgctttgtacgtttctttaggcagccgctcacgcataacggaatcgttaaaaaccatactgccgaaataggtggggacattggcgcaactcatcatccattcctcctttagacgcttgccaccttggtgtacaagcttaaacaaaaaagacgctgcgggtaaatgaactacccacagcgtctttgctgtttgatgaggccattatagtgcggcaggttaattttgtcaacccttttgcagtaaaaatatgcaagtttttttatgggacatgcagaaacaagggctatttccttatatatgtgcaaaatacaaactggttattgcaggaaaaataaagaaaatatcaaaaagaacatcgcgagggttgacaaacgcggaaggagcggcgtatacttaaacaacaggagaacaaaggagttcacgggaagtatttctatttcccatgtgaactcctttttttgttactcgtaaatgcgggcgtcagccttagggcggttggcgctttaaagacaaggaggaaaggctgatgttgcgggaaggacaggtacggattccatcgggctgcgccatttccgggatctttgaccggagcggcaagcgctttgacggcggggagatcattacctccatcgccaccatgcacgaccggtccaacggcctgggcggcgggttcgcgggctatgggatctatccggagtataaagatgactatgcgttccatattttttacgataccgccgaggcgaaggagaagtgcgagcggtttttggagcgtcattttgatatcgtcaacctttccaagatccccacgcgcaaaaacccggccattacgcgggagccgctgatctggcgctatttcgtaacgccgctgcccacccggctgcaggagagccagctggaggaaaaggaatttgtggtggagtgcgtcatccggatcaatacgcagatcgagggcgcgtacgtattctccagcggtaaaaatatgggcgtgtttaaagcggtaggtttcccggaagatgtaggccgtttttaccgcctggatgagtacgccggctatgcgtggaccgcgcatgggcgttatcctaccaatacaccgggctggtggggcggggcgcacccctttgcgctgctggacttgtccatcgtccataacggcgagatctcctcttacgacgccaaccggcgctacatcgagatgttcggctatcaatgtacgttattgaccgatacggaggttattacctacatcattgactacctggtgcgcaagcagggactgaccatggaggaagcggcccaggttatcgccgcgccgttttggagcgccatcgataacctgccgccccaggcgcgggataagatgctgtacctgcgcaacgcctttgccggctgcctgattaccggcccgttttccatcttggtggggtttgagggcggcatgatggcgcttaacgacaggctcaagctgcgcagcatggtgattggcgaaaagggcgaccgggtgtatatggccagcgaagagtgcgccatccgcatcatcgcccccgagctggataaggtatgggcgccccagggtggggagccggtcatcgtgacgttgcgcggacaagatgcaggggaaggagtgtaagagatggccattgattttttgtatccggaatttgaagtggtgcgcaatcctgaccgctgcatcgcctgcagggtatgtgagcggcaatgtgccaacgaggtgcaccgctatgatgaggaacggggcaggatgatcgcggatgagagcaaatgcgtgaactgccaccgctgtgtttcactttgccccaccagggcgcttaaaattgtaaagagcgaccataccttcagagaaaatgccaactggacgggccagaccattgtcgaagtctaccgccaggcggggagaggcggggtacttttaagctccatgggtaaccccaagccctaccctgtttactgggataagatgctgatcaacgcctcccaggtgaccaacccctccatcgatccgctgcgcgagcccatggagaccagggtgtttctggggaaaaagccgaagttggagcgggatgaggatggcaatatccgcacggataacctgccgccccaactggagctggaggtaccggtgatgttttcggccatgagctatggttcgatctcctataacgcccatgagtcactagcccgagcggccacagcgctgggcacttattacaataccggcgagggcgggctgcacgaagatttttatcaatatggcgcccataccatcgttcaggtcgcctccggccgctttggcgtgtataaggattatttggaagcgggcgcggccatcgagatcaagatggggcagggcgcaaaacccggcatcggcggccacctgcccggggccaagatcgtgggggatatctccaagacccgcatgatccccgaggggacggacgctatctccccggccccgcaccatgatatctactccatcgaggatttgcgccaactggtctactctttaaaggaagccaccgattaccgcaaacccgtgatcgtaaagatcgcggcggtgcacaacgtagcggctatcgccagcggcatagcgcgcagcggggcggatatcatcgctatcgacgggttccgcggcggtacgggtgcagcgccaacccgtattcgggataacgtgggcatccccatcgagctggcgctggccagcgtggatgagcggctgcgccaggagaagatcagggacaacgtttccatcgtcgtgggcggttctatccggtccagcgcagacgtggtcaaggcgattgccctgggggcggatgcggtgtacatcgccaccagcgcgctgctggcgctgggctgccacctttgccgcagctgccaggcgggcaggtgtaactggggcatcgccacccaacggccggagctggtcaagcgtctgaacccggatatcagctgccagcgtttgatcaacctggtatcggcctggaaccacgagatcaaagagatgatgggcggcatgggcatcaactccatcgaggcgttgcggggcaaccggctgatgctgcgcggcgttgggctgaccgaccgggagcttgcgatcttagggatcaagcatgcgggcgaataaaggaggcaaagggtatgaaacggatttatgtcaatgagaagtggtgcctgggctgccacctttgcgagtataactgcgcctttgccaactccggaaaattggatatggtggacgcgctgaaggggcagaagatctatcctcgcatccagatcgaggagggtaaggatatctgctttgcggtatcttgccggcattgcgaggagcctttatgcgtaaagagctgtatttctggcgcgatgacccgcaccgatggggtgatccacgtggatcaggacaagtgcgtgggctgctatacctgcatcatggcctgcccctatggggcggtcatgccgggcccggagggcggcgtagtgcaaaagtgtgagctttgcctgcaaaacagctgcggcgcaccggcctgcgtagcgggctgccccaataacgcaatctgttacgaggagaggtgaaaaagatgcgatacgtcatcatcggcaattctgccggagcgatcggttgtgtagaaggtattcggcacttggatggggcaggtgagatcacccttgtttccaaagagagagagcatacctattcaaggccgttgatctcctatttgctatgcggcaagacggacgaggagaggatgcgctaccgcccggcggatttttatgcaaaaatggattgccaaacgcggctgggcgtcagcgcggtggagatcgaccgggtacaaaaacaggtcgtactagaggatggcgagaagcttccctatgatcaattgttgatcgccaccggctcgcgtccctttaccccacccatcaagggcttaagcagcgtgcgcagtgcttatacttttatgacgctggaggatgccaaggcgctgcgggccgttttacggcgagaccggcgggtgctggtgctgggcgcggggctgatcggtctaaagtgtgtggagggcatcgccggtaaggtggccgccatcgacgtagtggatatggctgaccgcatcctccccagcattttggatgcgcagggcgccgggatggtgcagcgccacatcgaagaagcgagggatattcgctttcacctaggcaagagcgtggcctgctttgaagggagccgggcgatcctgaccgacggggaggaactcgcctttgacatattggttgtggccgtgggcgtgcgccccaatgtggggctggccaagagctgtggcctggcggtggaacggggaattttaacggattcgcgctgcggcacggacgatccggacatctttgccgcgggagattgtacccaatcgctggatgtgacctctggccagagcagaattctggcgctgctgcccaacgcctatatgcagggcgagtgcgcgggcatcaacatggcgggcgggcaggcggcgtacgataaagccatcgccatgaacgccatcggctttttcggcctgcatatggtgaccgctggaagctacgatggccaggaagatcttcagataggcgaaggcctatataaaaagctgtttattaaagagggaaggttaaacggctatatcatcattggggatgtgcggcgcgcggggatctatactgcgttgattcggaatcaaacgcctcttgacagcctggattttgacctgatccgagaaaagccacagctgatggccttttcccaaaaggcgcgcaaagatatgttaggaggggtaagccatgcgcattgacgcatccggaatgcattttaaggacctcaacgaccagatcagaaattgtgcggacgccagcattcaggtggaaaactgcgtgggccagcgctacctggctgcggccatgggcgagaataaggcattggagatccacggcacgccgggcaatgccttaggcgcctacctggatggcggatgcgtgacggtatatggcaactgccaggaagctacgggcaataccatgaacgccggcaccatcactgtacacggttcctgtggggacgccaccggttatgctatgcgcggcgggcgaatctttgtgcagggggatgcgggctaccgtgcgggcatccatatgaaggcttatgagcaaaaggtgccggcgctggtcatcggcgggcgcgcgggcagctttttgggcgaatatcaggcgggcggggtgatcgtcgtgcttggcctggggacgcaagatccggtgccggtcggcccgttttgcggcacgggcatgcacggtgggcggatctatatccgctgcaaaacgcccccggaagggctgcccgcccaggtagcggcccatactgcccgccaggaggataaagaggaattgcgcccgctgcttgaagcgtactgcgcggcctttgacctggacgccgaagcgctgatgcgggacgattattgcctgctgacgcccaatacacaaaatccctatcggcaactttatacgcccaactgatgggcggcagggcaaaaggcctccggtaaagccggaggccttttgccgcccttatcgccccagcgggatttatggtataattatatatacagacaaaaagcggcgcggccctaaagcggcccgcagctgggaaacgggggagcttggcatggtcgatattttggaatattgggatcgggatgcggcggcgcggctctgcgcggccatcgggatgccgccggaggctacggaagctatcctgcccgagtatggacggtttgaccccgccagtattgcgcgggcttttccgctgttgctggaccgggccaccggcccggcgggcgtggcggcgatagaaccggcggtagcggccaccggcgcgcgggcgccctgggtatggctggccatcttgctggcggccgcggcgcgcaggcgccagttggacagggagatgggtatccccgagccggtgacgatggatacgctggctgcgctttcccgctttgtgcgggatttttatacccaggagggccgctggggctttaagggccaaggctggatctggcggcagttaagcggcggcatctaccgcattggcgtgctggagtttgagcgattccgctatcccggcccggcccttggggcgggggatgcggtgctgactccgggggaaaagctgctttcggtgcacattccgggggacgcggtgctgacagaggccgccattgcggatgcttacgcacgggcggagggcttttttacccggtttgcaccggattgggattaccaaaagttctattgcgattcgtggatgctctcgccccggcttaaaaagctgttgaagcccgcttcccggatcctgcgctttcagcgcgattatgagattctggagtttaacggggaggactgccattatatccgttggatctttggggcgcagaccgaccccgcgctttttaaagaggagacctccctgcagcgcagcgtcaaagcctatgtgcttgccggcggtagggtaggggcgggcgtaggggtgtttgccaaggggcgctatggccttattgacgcggaccgcccgatacagtaatatggagaaggaaagttttaaggtgcaatttgagatggagggacgaaatatggtgaatttaatcgcggagggccgggtgtaccggggcggcgcttttgagcctttaaaagagggcaagccggcgcgggaaaagaccatggcctaccgtatcttggaaaaacataatacttcggggaacatggacgagctcaagatcaagtttgacgccatggcatcccacgatattacctacgtgggcatcgtgcagacggcccgggccagcggcatggaggcctttccgctgccctatgtgctgaccaactgccacaacagcctgtgcgctgtgggcggcaccattaatgaggatgaccatgtgtttggcctgtccgctgcgcgtaaatatggcggcatcttcgtgccgccgcatcaggcggtcatccaccagtacatgcgcgagcgcatgtccggctgcggctacatgctgctgggcagcgacagccatacccgctatggcgcttttggtaccatgggcgtgggcgagggcggcccggagctggtcaagcagctgtgccgcaagacctacgatatcgcctatccgcctgttatcgcggtatatttgagcggcaagccccaaaagggcgtaggcccgcaggatgtggcgctggccattatccgcgcggtgtttaaaaatggctttgtaaaaaacaaggtgatggagtttgtgggcccgggcatcgccaacctgacgatggatttccgcagcggtatcgacgtgatgaccacggagaccacctgcttaagctccatctgggagacggatgagcagacccgtggatggtacaagacccatggcctggaggagcgctatgccaagctttctccggaggagggcgcgtattacgatggcgtggtgatggtggatttggataaggtgcgccccatgattgcgttgcccttccaccccagcaatgcctataccattgaggagtttaaggccaatgcgcaggacctgctgcgcggcgtggaaaaagaggccgagggcatcttcggtaaggccgaagggctgcccgggctggtacaaaaggtgcagggcggcgaggtgtatgtggaccagggcgtggtggccggctgctcgggcggcacctatgagaatgtgatgacggtcaacgctattttgcgcgggcgccccatcggccagggggtattcaacctctcggtttatccggccagccagccccagtttatggcgttgcttaaaagcggcgcggcggcccagttgatggagagcggcgcgatcctgcgttcggctttctgcgggccctgctttggcgcgggcgatgtgccggccaacggcggactttctatccgtcataccacgcgcaacttccccaaccgcgaggggtccaagccctcgggcaaccagatggcctacgtggcgctgatggacgcgcgctcgatcgctgccacggcgctgaacggcggcaagctgaccgccgcgaccgatgtggattatgatgcgccggatctaagctatacctacgatgcttcgatctacgacaaccgggtctatcagggctgggggcatgcccatccggaggaggaactggtctttggccccaatattaccgattggcccgagcagatcgccctgccggagaacctgatgctggaggtggccagcgccatttacgatccggtcaccacgacggatgagctgatcccctcgggcgagacctcctcttaccgctccaatcccttggggctggcggagttcgccctttcccgtaaggacccgggctatgtgggccgggcaaaggtggttaaagcgctggaactcaaacgccgcaagggcgaagctgacggggaagtgaaggccttccttggcgatgcggcgccggagaatactggcattggctctttagtgtttgccttgaagccgggcgatggttcggcgcgcgagcaggcggcctcctgccagcgcgttttgggcggctgcgccaacatcgcgggcgagtatgcgaccaaacgctaccgctccaacgtggtcaactggggcatgttgccctttatcctggatggggcgtccgaatctggtatcgcggtgggggataagatctacctacctggcatccgggaggcgctgcagggcggcaaggatgcggtacaggcggaattgatccgcgatggccagcgcagcccgatcacgctgaagctgcccgcgatgaccgaggacgagcgggacatcatcctggccggctgcctgatcaactattacgggcaggaataaatcagccaaatggatacaaaaaaagccctccgcactggcggagggctttttgaattatgccggcggcgtctgcgcccattgggcgatctgcgctgccgcctgaagagggctgatggcagtgacatccagcttgatcgtgtccaaaagatcgtatagcggcaggcgggcgatactgccctgcaccgcatctgcctggcgcaggccgacctgtgcgtccttttgaaagcgggcgcgcagcgcctggggctggcaggtcaggctgatattcagcagttcaaagtccagcggctccaagccacgcagaatgtcatcgataatttgctgttggtgcatgacccagcaaaaaattacatagttcagccctgaattggtcagaaagccctgaagcaggtgacagatatgatccatcaccatggctttgttttcttcgtttacgataaagggattcaagtcccaacaccaatccccgtccaaaaacgcgctgggcaaaagcagtttgtgcagttcccggctggtggcggttttacctacgcccatcgtgccgccgatcaggatcagtttctttttcatgggaaaaggcctccttgcttggccgctaggcgaccagaagcatgaatatcggtatcgtaataatggagagcagcgtggataaaaacaccagccgagaggcaaagggcgcgtccccgccgaacatttcggcaaacatggccgtattggcggcgataggcatggccgcctggatggtgactacgcccatggccagcggcggaacccggcacagcttcatcaatcccatcaggattagggggatgactaccagccgcagcgcgcaggccaggtagacccctgcaccggcaaaggcctctttgatgcgcacatcggctagacgcgcgcctacgatgagcatggatagtggcgtggtcatattgcccagcatgcttagcgcctgcatgggcatatcgggtaatttaatggagaatacaaacatcacaagtcccagtaccgtggcaatggtgcctgggttgagcagcacgcgcttgatggcggccttgcggtcctccttttcagacccggagaagatgctcatccccaccgtccaaaggaagatattgaagatggcggtgtacatggagcctagcagcagcccggtctcgccgaagatggcctggagcaccggataacccataaaggccgcgttggaaaagatggcggcaaattgcagaggtttgcgctgatggagggcaaaccggttaaagatttttttgccgagcagccacatgacgatgtgcacccccagcgaccaggccacggcatggcccatatccaatagcagctgctgggagaattcgctttggaaggagaccaaaaccatgcagggcaccgttacaaatagggccagctggctcatggcgcccaaccccgcatcgcttaagatcttggtcttgcgggcgatcacccccaccaacatgatgataaagaggatagccacctgacctaagatcattccaatatccgtcatgacatgcgcgcctcgcttctaaatttaaatggttcaagcttgtcaattataccatacggcgcgcctatgggggaagcgaaggacaggcattgcaatgtgaaagagtgcggcagcgcgagccgtactttgatgaaatattaatataaaagactaagataaatattccgataaaaaacccaagatttcagcgatatttctcttgcattttataagacctcccggtataataaatatgctgtctgcggacagaagagcgtgctgatgtagctcaggaggtagagcacttccttggtaaggaagaggtctcgggttcgagtcccgacatcagctccagcggcatgttgccgcatttaataccgcgatttacttaggtaaattgcggtatttttgtgccgccagtaaatatccatatcgcaaatctctgccagcggatcctgtccgcgtcaaaatcgcattttctacatggctatgcaatttttcgttacagtaaagcggttatccatatagattgccgattatttcattccctcaaaataagataaagatgattaagttatgggcctttggttaacagatccaatgaagataagtgcggggagagtaaagaaacaagggcccgctttgtgtgagggaaatagaaaaagtttctgtaaatataaaaataacagttgcggcgcgctgcggaaacaggtatgataaaggtaaagaaagaacctgttggcacaggttgaaagtgggggatcgtaatgaagaaatatactatgttaagctttgcgctgatgctggtggcggctatcgccttgtccgggtgcgcggtagagacacagcaaaacgcggcaggtacgccgtccgcgcagggcacgcaggccgccgcttccactgcgtatgacccaaatggggaaaagtcacttagaaactttaccgccaccgatttagagggtaataccgttacgcaggatatttttaaagagtaccagatgacgatggtcaacgtttgggccacctattgcccgacttgtatggaggagcttgcggatctggcaaagctgtacgccgagaatgccgacaggaacatcaacatcgtggggatcgtgtacgacgccaaaaagagcgacggcagcattgatgaaaagcaggtggcactggccaaagagatcgtggagcagacaggggcgacctatacccagctgcttccctcgccagacctgcaagaggcgatactgggggatgtgactacggtgccgcacaccttctttgtggatcatatcgggttgatgatcaacgatcccttggagggcactaaggatatggataattggcaggagatcatggataagacatatcgcgtgtactatggaggttgccgtgtcaaagaataagcgaagtttcccctggctgacggctggcttgatcgccgccggcgctgtactgctggggatcggatacttccgtggagagatggaaacagtgcttcgaaaggccgtgaccatctgcctggaatgtattgggatcgggtagcgccatgggaaagatcaaaaatttgcgtttgcttgtacagcttggttttaccgcgctgaccaatggatatgtgacaggctttgtacagggcaagatatttacaggtttgagtaaggccgcttgcctgccgggactgaattgctattcctgcccgggggcgctgggggcctgccccatcggctcgcttcaggcggtgctcaattcccgcgagtatcacgtatcgttttacattgtgggctttctggtgatcttcggcgcgctgatggggcggctgatctgcggctggctgtgcccgtttggattgatcgaggatctgctgcataagattcccttccccaaaaagctgcgcaagctccccggcgaccgatggctgcggcacttgaaggtggcgatcatggtgggctttgtgattttgctgcccatgtttttggtagacgcctttgggcaggggcagccctggttttgcaagctgatctgccccagtgggacggcgatggcgggactgccgcttttggcggtaaacggtgcgctgcgggatatcgcagggtggctgtttgcctggaaaggcctgctgctggggatcatcgtcctgctgtcgattatcgtataccggcctttttgccggtacttgtgcccattgggggcgatctacggctggtttaaccccatcgccttatatcgctaccaggtggatgaagaaaaatgcacccggtgcgggcactgccagcggacctgtaagatggatattgatatataccgccatcccaatacggcgcaatgtatccgctgtggagactgcctgaaagcctgccctcacggagccttgcagctcaagtaccgctgcggcagccgcgcgcaggagcggcccgggcagagcgcggaatagaaaaaagcgcccgctgttgtggggcgctttgcttatagccggtccaggtgcctggggcggtccaaagcgataagggcggggccgaaacggtaaaaatccccgtcgaatatatggacctgtaaatgctcaggctgcaatgagccatccaggatcccctcggtgcaggcgaccagggcgggcagaatctgcggatctacaggacactcgtgcccgccgcaaaaatcttgaaattgcccgcgctgggccaaaagggcgtcggcatgggcataaaaacggcgtgctgcatccatccggtcgccgggcagcatcagaaggaaaagggcgttataggcgtcgcctgaatagacattgccggtgagcgaatccacaaagatcacggagccaggggtatggccaggcgcttcccgcacggaaagcgtgcggccgcccaggtcaaacacatatccttcacgcagtgggagcagttccggctcaaagcgagaaggggcgagcggactgtggccgagccgcttcccgatctcgggatgggcgctgaccatcgagtggcagtaatctctgcgggattcagggctgatgcttctggccatctcccaatcatcgggatggagatagacctgctcgaactggaccgcgccgcccatatggtcgccatgcccatgggtagccgccactgtaacgggcttatcggtcagcgaggcgactaaagcggacagatcgcccacgccagtgccggtatcgatgagcagcgcccgagcctggccgatgatgagatagcatagatcaaggccggcttcgtcaatgcagtaactatccggcgcgatacaggtgaccttaaaaggggagtgctccatgggaattgtccttcctttctcaatttatagcactgcgcgtcctgtcagggtatttgcgactgtgccgccaggggtaatggatgaatattgccttgtggcaacacgcgcaatttctatgttgaatatgggcaaatagggttcacactatgtacagtttcagttataatcatattgtatagaagaactgggcaaaaggcaaacgaaaacgacaaaaaagaaacgctagaacgattgactttcaataataaatagttgataataaacttagttataaaatttgaccaggattttaggtgaggaagaatgaataatgatggaacgcggccggcaaggctgagcaataagcccaaaaatatacgttaccataaccaaaagttggtgacctcgctatttcgtacggcggatgtgctgtcggtcagcgagatatcggaaaaaatcaatctgagcaagaccaccgtgaccaaaatgatgggggattttgtggccagggggctgatcaagtccgccggcaaggggtcctctaccgatgagggcggcaaaaagccggaattatttgagctgaacgcggattacgcctatatcgtcgtactggtgctgcgctacgaatcgggactgatgcagatcgacggggcagtggtagacatgaagtgccgcgtactgcataaggcgctggaaaaggtagaggagccgcgcagctatgaggggacgatcaaacagctggccgatgttacggtcaaaatggcgcaggatatgaacatccctcaggaaaagatctgtacagtaacgctgggttttgcaggtgtgtgcgatgctgataacggcattatttactatcccatgtatccgggttggccccgagatctgcccgcacgcgcggatatggaagcggcgctgccctttgagacggcggtttatattgataatgattccaggttccgcggctactcggtgctgcaaactgaagagaaccgccagctgcaaagcattgcgatcatctccagcggcacgcgggccggcggatgtattttggagaaccacgcgctcaaccgcggggtaaacggctttgtgggcgagtttgggcatatggtggtagagccttacagcaaagagcagtgcagttgcggtgggtatggctgctttgaaagcatggtttctaccgatacggtgctgcgccgggcttatgaggtgtgcgataattatccccactccgccatctatcaggcggccaaggataagacgctggagatgcaggatgtttttgcggcagccaagcagggggatgtgctggccacgctgctcatggatcgggtgatccactatttctcgatcctgatccataacatcatgctggtgtgcgatccttccaagtttatcatccagggtgcgtttacccaggctggcgattactttttggatcatatccgcgaggaggtcaacgccttcccgttctttaacattaaaagccagttgaacatctctttctccccggtgccctggaaagaggcgttttacgttggcgctgcgctgtatgccacgcaccggttctataatgatgacgagctttacaattaattgatgcttaaacgcaaagcgggccgcatttttgcggcccgcttttcttatcatgctttatgcgtcctgccctgcgtgagtgacggacctataacattgcctcatccgcttatagtgagctttggcggtaaaacgctccttatcgctctgggcgatggcataactggcctgggcaagtttttcgggctcatccagcaatttagccagcacttcgcgcagcgcatgggcatctcccgaggagaacagccagccggtgacctcaggttcaatataatcggcgaagccgacggaatcgctgagcaccagcggaatatttttaagatacccctccagggccacaaagccaaaagtttcaaaccatacgctgggaaccaccaccaggtccacatcgtccaacagcgtgttcagctcgcctcgagtaaagctgggcaatagggtcacccggctgggcgagatatcgcgcaattctactttggcgcccgtacccagcagctttaaacggaaattatagccctttttctctaaccgggagagcgcgcggatcagtaactccggccccttttcaatggtagcgcggccgataaaggcaatgcacaccggatagccgggcaacgcacctttgcggggagtgagcttttctaccccttcgggaatcagcgggaacagagcgtactgcccctcgaacccatagcggcggtagacctccaataccgcgtgggaggcaaacgtggtcacgtcacaggcgctgatagcggccatcagcctttcgcgccgcagggcgtaatcctccggagtggcctctgcccgccctcccccggatggtgaagccgaaaacagcctgcgcgccagcgcggcggccaggcttttaaagcgcttgctgcgccgcacagggtaaaaggccgggttgtcccgcaacgcacgctcaaatacagaaggggcgtggcggttgcaggctaaacaatcatcgcagccgtggtcctcgtcacagcgaagggactgcgcgttcattaaattcaccgtcggacagatcggatagtaatcgtgcgcggtgtagataacgcggatgcccatctgctgggccagtgtgaccagatagggcccaaagccgataaaagaatggatgtgcaccacgtccggctccagctcccttaacaaaccggcataggcccgcgcggcctcgggatggtcgatatcccggagcggctctttgatgccgcccagcaggccgatgggcgcgggattggtcagttcatagcaggcgaccccttccagcttgcgcggccgggagcggatatgagaatggctgaacagcagcgattcccgcccgggatacagcagggcgatctgcccaatattcgggtcttgcttttgcagggcaatcagctttagcacataactggtcaacccgccgctgcgcagcgggggcagccccagtgtgacgtgtaagatccgcatagcgccctccttttaagccggcctacagcgcgccggcaatcagccgttcgtatagggacgtaatccgctcccagttgtaatactcttggatccgccgcgcgttagcctggcgcaaaggctccagcagtttatcgccctgggcttccatcttatcaaacagtacggcaagccgcccctcttctttgctgaaaaacaggcccccctcctgcaatacctcccggttaaaatccacatccagcgcgcatacggcgctgcggcagcccatcgattccagcagagaggggttggtgccgcccacctcatggccgtgcagatagcaataggcaccatagcgtatacgggccagcagcggcgcatcatagatgggtcctaccaggtgtactttgccagcccgggccgggtgggcctgcagcaggctttcaacttggcgcatcagcgcaccctcatccggattggtgaccatgagcaacggcagctgcgcgtggctttgcaggtattcccgcaggatcaaaagcagattattctccgctacgaagcggcccacggtcagataataatggccctggcgcagctggtatttttcaaggaattcactatagccgccctctggcgcgttctcggggtcaaaaagcggcgcgccgtattcgatcaccggcgtctgggcagcggggtggctgtgccgctcatgcgcggcgatggcggcggaatcgcagatgatccggtccgcctggccgcaaagggcgcgctcgcccaagcggagatagagccgcccataccagggccagcgcgagcgtttccattctagcccatcaggattgatccaaaactgaacgccccgcttttgcagcttgcgcaccaggaaaaagccgaaaggccccaagccgtagcccagcagcatgcacttatcgccccgctgggcgcgggccaggatcagcttgagcgcggagcggtcgtttacgatagaggcggtcacgcttttggcagctgcggggaagatcagcctctcgacgccctgccacctatcgctttgcgctttttccccctcgcaggtgacgctgaccggatagccatcccgcgccaggcggggggccagctgctctacaaaggtctcaaacccgccatagcgcgcggggatgccccggcagccggcgatatacaaatgcggtctttccataaatgtacttcctttggttaaaggctatgcatcctgcaccaacagcgcggaaagctcttcgcgccaggcggcgatgcacgtgccataatattttgcggcatcatggcggcccgtcaggcggcaggccagccttttcagccggaaagagacaaggttgatgcggcggatgcgcgcggcccgcccctgggtaccgtatttttgtaaaaacaggcgggtgctggcgatcacccggacgatgcgcctgtccccatatcgcttggcggccgatacgttgtgggcgtggacgacgctgccgccggcccaataatagaccgggcgccccagacggtttagcttaaagcacaggtccatatcctcgccgtacataaaataatcttcggtccagccgccggcgcgctcaaaatcttcccggcccaccagcacgaaagcccccatgatccaatccgccggcccggagcgggcatagttccgattgggcagggaaaggcgggtgcgcagcgcctggggcaaaaggcggcttaagtaaaatttatccaacacctcgcgcccggcggtggggaaaaagctgcagcttttttgcaaagcgccgtcctcccccagcaggcggcagcccagggccccatagtggggaagcagttgggcaaaggcctgtaaggcccgcggcaggctgtcatcggtaaaataggtatcggggtttaaaaacagcaggtcccgtccgtgcgcgtgacgagcaccgacgttgttaccggcggcaaaacccagattatcctgttgcgccagcaatgttgcgccatagcgggcacagctgacgcgcaacgcgtcaagatcggccgaagcgttatcgacgacgatgacctcgccatcgggataaaagcgggacagcgactgcaggcaggcttcggcctgctgcgcgcaattccaggtcacgataatcacgctcaattccggcgccacggctgttcagctcctttaaaacggtctacaaaaaagcacagatatatttagtataccacaactgctttatggaaaccacgtttgcttcaagcggtgtttgcgtaaaaagggcggcagccatttaggctgccgcccgcaatgcaatttccccaaaagggtacaggcttagatcaggctatctagcgcttccccgatccaggccagccgctcgtaggggatggactcgtccagcgagcaatccgaagagaggacgaggccatccttcccggcctgggccaccagctcccgggtatactgctgcaaagcggccttatcggcgtggtagatcacgctttgagctttgttgtcaaacccgcccatcaccgcgttgcagtgggtaaagtaagttttgccctcttttaacgacatcttgtcggtatgcacatcccagttgatgacggcggccggataatcccgccaggcgtccagatgattttgaatgcccgcccagccgcaaagatggacgatattataatccgaaacggcgttggctgcgcggatggtgacaagatcgctgggcgagatgtactcgttatattcctccacgctgaaacggtcccgctcgccgccctggatggggaggaacacgccggtggccccgccctcctgcacaaaaagccgggccatctcggctgaaacctgggctaccgcgtccagcgcgcgcagcacggcgggccggttctcccgcatatgggccatcaccagctcatcgctggtggcaaagcggatgttggaaaaggcggcgaacatgttataaaatacgcaggcctccccctccagatcgcggaacatcttgatcttatccacctgctgggtgataaatggatcatccagcttgggcaggcggatatggtcccaatcggaagcggacttgacctcgatccccaatgggatgtacatatacccgtcgcacatcattttgagaaaatcctcaccgctttcccggtagaatttagcgtgcgccgctacgttgggtctgccgaaggtctgatctccgctaaaatggtgccagaaggtgtacggcggccggtcgactttttcgccccgaaaggccttgagtgtgcgcgtttttttatccatgatataagccccccttttaactgctttatatactttattataggcctggttttccatacaaagcaataagaggatgccccttgtgcaataaaaactgcaagttcatcattgtttgcaagctgacaagaaaaaaagcttgtgaagttgacgcggggaaagtacaatggcattggtgggaaatttgccttttaaggaagggatcctatgattaaaacgaaaattatctgtacgctgggtccggcaacggacaagcccggcgtcctgcgggaaatgatcgagagcgggatgaacgtagcccggctgaatttcagccatggagaccatgaggagcacgcccggaggatcgctctggtcaagcagctgcgcgaggagatgcacctgcccattgccatcttgctggataccaaggggccggaggtacgcaccggagattttgccgatccgccggtgatgcttacggcgggggagacgtttacgctgaccacccgccagatcgtaggggatgagacccaggtctccatcacctataaggacttgcccaaggatgtcaagcccggcgcgcgcatcctggtggacgacgggctgatcgagctggaggccaagcgggtgacggaggaggacatcatctgccaggtcatcaacggcggggcgctgtcgaacaaaaagtccattaatctgccgggcatcatgctgaacctgccctatatcagcgaaaaggatgaggcggatattatttttggcgtggagcagggcgtggattttatcgccgcttccttttgccgcagcgcgtatgacgtgctggatgttaagcgtatcttagaacagcaccatggggagaacatcaacgtcatcgccaagttggagaacagcgatggcgtgcgcaacctggaggagatcttaaaggtttccgacggcattatggtggcccggggcgacttgggcgtggagatcccctttgacgagctgcccatcgtgcagaaaaagatgatcaaacgttcgctggccatgggcaagcgggtgatcaccgccacccagatgttggattcgatgatcaaaaatccccgccccacccgagcggaggtgagcgatgtggctaacgccgtgtacgatggcaccagcgccatcatgctctcgggggagacggcgatgggcgcttacccggtggagagcgtgcgcaccatggcgcgcatagcctgccgggcggaatcggatatcgattatatcaaacgctttaaccagcaaaagcaggacttgaatatgagcgtgaccaacgccatttcgcatgcgacctgcaccactgcccacgatttgagcgctgtggcgattatcacctttaccatctcgggccgtacggccaagcggatatcgtccttccggccggcctgtccgatcatcgcctgtaccacgctcaggcaggtgtaccaccagctggccctatcctggggcgtgacgccggcgctgtgcaccgagatgaccgccaccgacgagatgttcgaccaggcggtggagagcgcggtagctaccggacaggtgaaaaacggagacctgctggtgattaccgcaggcatccccatcggggtgaccggcaataccaatatcctcaaggtgcacatcgtaggcaacgtgctggtcaagggcctgggcgtcaaccggctttcggtcagcggtcagctgtgcgtggcgcacagcgcgcaggaggtacaggagaactttaatgaaggcgatattctggtggtgccacgggcggatgagcggatgatgccggcgctgaaaaaggcccgggcgatcattaccgagcaggagggcatgaccaacctggccgccattgtggggcttacgcgggatatcccggtgatctgcggcgcggagaacgccacctgcatactaaaaagcggcacggtggtcacggtagacgcggccagcggccaggtctacagcggggtgacccgcacccaggggcaataaaccagacgattttaaagggacgcgcatacggcgcgtctcttttttgctgcgccggaacgcggataaaggcctgccgaaaaaaacggtgggcttttttggcgttttagtttatatactgctaggaggagaggaggctttaaaatgcggataaggagaatgctcatggccttggtactggcaggactatgctttttaacggcctgcgcggcgccgggggatgtcaagatgaacgcgcagccccaaactcggcaatttggagagatcgccatttcctccctggtagagggtcagccaggctgtgagatcagcggaaaaattccccttaccggggtagaggcggtagacaatacccttatgcagtgggccatggggcaagttgacgcctttaaacagcaggccgggaacctgcccacgatggcgggcgccccctgcagccttacgatggaatatcaacccatctggtataatacggatacggtcaccttctattttaaacaatatcaggacctgctgggagcccacggggcgtatctgctcagcacctttacctttaatctggaaagtgggcaacaaaccaccttgcaggatattttcgccccaaataccgattatctggccgcgctatccaagctggcgctgcaaaagctgcgggagcagcccgagagctatgacgaatacatggccagtgtggggctgacgccgaaggaggaaaactttgcggtgttcgccccggagcccgaggggttgagattgttttttagcccctatcaggtggcgccctgggcttatgggatgccggaggtgctgatcaaatgggatgaattgcaaaacgtgctgcgcgcgcaatacctgccggtggaactgaggttgacgggcagcccgaaagaagaaaagctgattgccctgacgtttgacgacgggccgcaccccaccaataccgttaaactgttagacgggctgaaaaagcgggacgtgcgatgtactttttttctggtaggggagcgggcgcaggaacaaaaagagttgatcgggcgtatggtggcagagggacacagcatcggcaaccacacctattcccaccgcgggctcaacggcctttccctttcccaggtacaggaggagctgaacaaggcggatgaagcgatcgaggcagtcacggggcaaaaacccaagctgctgcgcccgccctttggcttttgggaggaggaatacactccttttataggcaagtctgtggtattctggtccattgacccggacgattgggggcaccgcaacaccagctacctggtcaaacatatcgtcaaaaatgcccacgacggcgacatcatcctgctgcacgatatgctgccgactagcgtggaggccgccctgcaggtgatcgaccagctgaaaaaagatggctttacctttgtaacggtggatgagttgatggaaaagcggctggctgatgccaatcctagccagagctttcgcaagttgccctgaagcgggccggtaccggttgccctaatgccggggttgctatataatagaaaataactatgaatttgagctgtgagcagtacgcaggaagagggactaggaagaaaatatgacagggataaaaaatgtcgatttggattatacaggcgattggacggaggggctgataaagggcgattttgccaagcggatagaacgggtgcgcgcgcagttgaaacgcatggacgcgcaggctgtcctttgtaccgccaaccccaaccttttatatttgacgggcggcatctgcgacgggttctattacatgccggtggaaggggagccggttttctttgtgcggcggggagagcccaatgtgccggtgggccgggtcatccgggtgcgcaagcccgagcagatcccatcgtggctgcagggcgaggggatgcccctgcccgacaggctggcgttggaagatgaagacatctcccaggcgctgtatgcgcgcctggcgggggctttccccaaggcacaggcgctgccaggcagtcgggcgctgcggctggcgcgcagcgtaaaaacgcccctggagctttccctgatcgcccaggggtgccagatccaatcggagatcatcgccggtgcggcgcaactttaccgcgaggggatgacggattgggactttgcctgcgcggtggaatatgcctgccggcgcaaggggcacctgggcgtattccgaacttttggggagcggatggaggcccatatgggcacgctgctggctggggacaacgcagcggcggtttcgccctacgattttgccctgggtggcgcggggcggcatccttccttgccggtgggccagtgtggcgcgccaatcttggatggacagaccgtgatggtggatttttcggccaactatattggctatttgggggatattacccgcatatttgcaaagggcgtgttgcccaaagaggcatacgcgctccacgagctgtctttgcagatccagcgggaactggcccagatgggcaaacctggggcatgctgtgcggcgctgtatgagcgcgcgctggagatcgcccgagagggcggtgcccagcggtgctttatggggctggagcgccaggcgcgctttgtggggcatggcttgggcatccagatcaacgaattgccggtgattgcccaaacggatacggcactggagcggggcatggtcatcgcgctggagcccaagttcatcgtgccgggcgtgggcgcagtaggtacggagaacacctatgtcgtgatggaagagggcatgcgcttgctgacgcggtgtccgcaggatatcctgccgctgtgaacccatggatgggccgctaaaggccagaataggagctagaaaaggatgttcaaacactggaaaaaggatatcgatgcagtattaaaacgcgacccggcggcgaccagtgcctttgaggtatggctgtgctatccagggctgcgggccatccgccgccaccgcagggcccattggctgtataagcgggggcacaagttgttggcgcgcatggtctcccagcggacgcggcgcatcaccggcattgagatccatcccggcgcggtgatcggcgagggcgtgtttatcgaccatggctcgggcgtggtcatcggtgaaacggcggtggtaggggattactgcaccctttatcagggggtgaccctgggcggcacgggaaaggataccggcaagcgccaccctacgctggggcataatgtgatgatcggctcaggcgcaaaggttttgggcccctttacggttggggataacagcaagatcggtgcgggctctgtggtacttaaggaggtgccgccgggctgcacggtggtgggcaatccggcgcgcatcgtgcgccggcccgaacccattttgccggacgagggcgagcaggcggtggatctggatcaggtaaggctgccagaccccatcgacgaggagatctgcgaattgtacaagcgcatcgaacagttggaaaaccgctgcaaacgtcatacggcccagctgctttcgcagggcaaattagaccccggagaggacaaacgcgaggattgaacctagaaagagtgaaaaaggcggcgctaatttggcaccgcttttttttaatttctttgtacacaagagcgcggattcgtctgttgagcgggcgcgcaggagtgtggtaaacttgaaccaagcaggctgcgcctgacgagagaaaatttgaagggggctaaacaaaatgaaagaatatctaacttcgttgctggaaagctttgtggctaaagaagatgtggctggtgtaaacgtgctggtcaccaaggatctggagccgctttaccaaaagagcctgggttttgcggatttggagaaccgtacacccatggcgccggatacgatctttcgcatcttttcgatgagcaaggtgatcacctcggtatgtatgctgatcctttacgagcgggggctgtataagatgtatgacccggtggaggtctatctgccgggctttaaaaaccagcaggtagcatcggaagggttggatggacgcgtaaccctggcgccggcagcgcggcccgtggcgatacgcgatcttttcaccatgaccagcgggatcccctatggcaatgagatcggatacgtggcccgcaggatgcaggagctgtttgaggatgtagccgctaaggagggaacggggcagtgctatgatacggtctctttagctaacgccatcggccaggttccgctttgctttcagcccggcgcgcattggatgtacggcctatccaccgatattttaggcgccctggttgaggtgatcgacgggcggacgctgggcaagtttatgcgcgaagagatttttgaacctttgggtatgcgggataccggatttaaaatgccggcggaaaaacaggggcgcatcgccaagatctatgaggtggaacagggctaccgggtttttgacgcgaagagcagcggtatgtgcgagcttgaacggattgaatccggcgggggcgggctgatgagcactgcggcggattatacgcgcctgtgccagatgctgctgatgggcggcacgctggatgggcagcggatcctgggccgtaaaacggtagacctgatgcgtaccaaccacctgacggatgaacagcgcaggaccagcgtttgggaatctcagcgcggatacggatacgggctgaccgtgcgggtgctgcaggaccgtgctactgcgggttctaacggctctggcggcgagtttggatgggacggtatgccgggaacctatatgtgcatcgacccggtggagaagctgacggcggtatacctggtagggcgcatacctggcgcgcatgcggactttatcccgcgttttaccgcggcgatgtatgcgatgctgtaaggggaacagaagaactaatgtaataaaaagtgtatagcgggtggtgtagagcgaaagggttaacccttttcgctctatttttatgtgatattatagtagcttttatatactgacagttgtattacagaaggaagaagaaagattagaataacaaatatttgggatatatccaacacttttcgctgaagaaaactacataatagtgacatatcaatcacttctttgttttagctgggataagcccttattataccgatatattgttgcttttgagggcataattcggtgaaaggcggcgattagcttcaacagcgcaccacctttgcgtgaattgaatctgattaatacgcgacttctgtatagataagtgacttgtgattttgtgagggcgcagaatcatgcgtttgcttgggatgaggtcgcttaatactactaaatggtagcataaatgcgggttttatgccacaaaatagtagcatttcaggcaaggggtgttgatgcacgatgtactttcagcgtctggaagatctacgaattgacaaagataaaacccaacagcagattgcggatatgctgcactgcaaaagggaggtttatcgtaggtatgaaaagggaatacgggaaattccggtctgggcgcttatcaagctggcctattattacaatacgtctacggattatatcctgggcctgagcgataaacgagacccgatacgataaaccccatctgcccaaacgagcgccaaaacgccgaaattatgaggcgttttttgtttttcaaccgatttttcttttcccttccagcggtgcggcctcgcgcttgaccaggtggcggtaggcgcccgcgccggccagggtcaggatggcgatcaagctcaagagcaaaccggccccccagtaatcggactgccccagggcctggccgctaaaacaggtgctcagcaccgccggcagccgggcggccagcatcaggggcaaaaagtgcctggcgcggcagggcgtcagtccagccagaatcaccagggtggttttaggcgtccccggcacgagaaagagcaggtataaaagtaggttgagccttttcgcatcggaaaaaagcggcagggcatagacccgctgcatatcgataaacagccccgccaggcgcgtggcaaatttgcggacgcaaaagaaaagcagcgcgctggccagggcgatcccagcaagacagagcagggcgccgggccacgccccgtataaaaagcctgcggctacttgaatcacgctggctggcaccacgggcaacgcggcctgcagggcggaaaagccggcgatcacggcccagccccaaatgccgcagcgctgtgccagcgcgtggagctggcgagggtcttgggccagcgccagggcatcccgccccaaggtgagcaacagaaccaagagcgcagcgatcagcgccgcggcaacgccaaggatcagccaccgcttgccgcgcagacgggctcgctcttcaggacttatgataagataacttgtcaaacgggtaaaccccgctgcaagtcgatttttaaagcgcacgcctagggctcctctcctatttataacaccggtatcacaaaaagtttatcatttttacgcgccggatgcaaagcagacgcctgcattgcggcgctttgctatgccccaatgcggccgcaccctgccagcgggtgatgaatatactgcattatggatccccgtaatttctcatggcgggcaaatgaatcattaaaggaggcgtttcctatggacacatctcccttggtcaaactatcggctgtggacttggtgtatcacacgccggatggtgaaacccaggcgcttgacggggtggattttgaagtcttctccggcgagtttgtggccctggttggacccagcggatgcggaaagagcacggtcttatccctggtggcggggttgcttgagcccagcagcggcgaggtgcttttagccgggcaaaaggtgagcggcccctcgcccagggtaggatatatgctgcagcaggaccatctttttgaatggcgtaccatctattcaaacgcgattttggggctggaggtacagcacaagctggatgcggagagccgggcgtatgtggaagggctgttacatacctacgacctatggcaattccgcaattattttccccatcagctgtccggcggcatgcgccagcgggcggcgctgatacggacgctggccgcaaggcccgatctgcttttgctggacgaggctttttcggcgctggactatcagacaaggctggtggtgtccggcgagattgccgatatcatccgccgggagggcaagacggcgctgatggtcagccacgatattcccgaggcgatttcgctcagcgaccgggtgctggtctttagccagcggcccgcccacgtgcagaccagtatccccattaacctgcccgctggcccgggctttgccttaagccgccggcaccacgccggctttaacgcctactttaatcgcatttggaaggagttggatgtccatgggaaacaagaagcggccgatgccgccgtctagcccggcaagcccccagcaagaagcgtatctgcacggcctgcgcgtccatcaccgccgggtgatctacgcgcggctgggcctgctggtcggcttttttgcgctgtgggagctggcggcgtttttgggctggatcgatcctttcatcgccagctcccccagccgcatgatgcgtaccctatacgatctagtggcgcaggggcagctttggcaccatctttataccacgctgtatgaaacggtgatcggctttgtactgggtacggtgctgggcacggccatcgccatcgcgctgtggtggtccgccactttgtcggaaatattggagccttatttggtcgtgctcaacgccctgcccaaaacggcgctgggcccggtactgatcgtatggatgggtgcgggcacgcaggctatcatcaccatggcgctgctggtctcgctggtggtgacgatattaaacgtgctaaatggatttttgtcggtagacagcaataagatcatgctgatgcggacctttaatgccagccgcggacagttgttgcgcaaggtggtactgccggccaatgtgccggtgatcatctccgcgctcaagatcaacgtgggcatgagctgggtaggcgttatcgtaggggaatttttggtgtccaacgccggccttgggtaccttatcgtctatggcgggcaggtgtttaagctggacctggtgatggcctcgaccttgctgttggccattgccgccgcgctgatgtattatggtgtagcgttgctggagaaaaaggcactggccatgcgcaacaattaaagttgaaataaaagcaatgcccccatgatatgggggcattttttttagctaaaaactaaatatatttagtatttgacgaggcgtttagctggatatatacttgatttaacgagattatgggactaaattaatttattgaggtggcgggaagatggatgtattgcagttgaagcagatcgcgctggaacgcaggcgggatatcgtccggatggattatgcctccagcgccgggcatgtaggcggggcgctgagctgtatcgatatcctggtggcgctctactttgacgcgatgggggagaaggatcactttatccagagcaagggtcactgtgcagaggcgctgtacagcgtgctggcggagaaagggaagatccccaaggaggagctgaacacctattgccaggctggctccaggctgtacggacaccccacggtcaaggtgccgggggtggaggtgtgcactggcgcgctgggacacgggctgccggtggcgctggggatggccaaagggcttaaagcctccggcgggcgggttttcgtgctgctgggagatggggaaatggcggaaggctccaactgggaggcaatcatggccgcggcgcattataagctggataatctggtggcggtcgtggaccgaaaccatctgcagatcagcgggaacaccgagcaggtgctggcagctggagatatggcagcccgcgcgcgggcctttgggtgggctgcggccgatgtggacgggcacgacatggccgcgctgacaaaagcgttcaagacgctgccgctggaggcgggtaagcccacgatgctggtggcccgcaccatgaagggcaagggcgtttcctttatggagaatgacccgcactggcaccacggcgtgatgaacgcgcagcagtatgccacggcgctgcgggatttgggagtggaggaataagcatatggagaagttggattgccgcaaggcctttgccgatgagctgctggagttggcccgtaaggatcaggacatcatgctggtggccaccgattcccgcgggtccgcggtggttggagagatcgcccaggcgctgccggagcagtttttggagatgggcatcgcagaacaggacgcggtgggggccgccgccgggttggcgctcacaggcaaaaacgtattcgtttgcgggccggcctgctttttggccatgcgcagcgcagagcaggtgcgcatcgatgtggcctacagccataccaatgtaaagatcgtgggcgtcagcgccggggtgagctatggttcgcttgggtctacccaccataccacccaggattttgcggtgatgcgcaccctgcccgggatgctggtgctctgcccctcggatgggcgacaggcggcggccatggcccgctacctggcaggatatgagggcccggcctacctgcgcatggggcgcgggccggtgccggtgatctacgatacggtggagcgtagctttaccccgggtaagatcaatgtactgcgggagggcaaggacatcgccctgatcgccacgggcgagcgggtctattacgttttagaagcagccaaggaattggcgcgccggggcgtagaggccgcagtgctggatgtgtgcacgatcaagccctttgatgtggaaacggtgctgcgctatacgcacaattgtcctgccatgacgattgaggaacatcatccctttggcggcttgggtgatgcgactgcctgtgtactggggccgctggggcgcaggctgcaccgcctctccctgggggatgaatgggcggtgtgcggctcggcaggcgagatcgctgcgcacagaggtatggacgtgaagggtatcgtggccagcgcgctggagctgacgcgggggtagcaagatggcgaaggtgacgtttaaggagatcgcaaagcatgcgggggtatccccctccgcggtctccattgcgctgaacaaccagcaggggatcagcgatggcacgagggcccgcgtgctggccgcagcgcgagagctggggtatgtgcgcaagcccctgcccacgctggcgcaggtgatcccggtgcggctggtgtgctaccagaagcacagcctggtggtggagcagacccccttttttgacgcgctgtttgacgggatccaaaagagctgccggcggatgggcgcggcgctgcagatctattacgtacaggaaaaagacggcaacgaggaggagatccagcgccagctcaacctgcatcccgagcagggggctattttactggccacggagatgaacgaggcggatgtgcggcgctggatggataaagtgcccaaactggtggtgctggacagctactttggcacgctgaaggtggataccgtcgccattgataacgaagaaggggcctatgaggctacccggtttttgatcgataagggttatgaaaccatcgggcatctaaaaagcgcggtggatatcaacaactttagggagcgggagcggggctttgtgcgctgcatgggcgaggctgggttgcagagcacggcggatatatctctggaatctacgctgcacggggccaagcgggatatggaagcttacctgagtgcgggcgcaacgctgccccgggccttgtttgcggataacgacattattgcgctgggtgccatacgcgccatgcaggaaaagggcattgacgtgcctggacaggtggaagtggtgggctttgataacctgccctacagccagctggccagcccgcctttttccagctgctgtgtgttcaaacaccagatggcccgcatcgcggtggggcgtttggcgcagctgcgggagacgcgcacgggcgcgcaccagaagatacgcgtggctaccgaattggtagcgcgcggataagggggaagaaaatttgcggtatattttagcgatcgatcaaagcacctccgccaccaaggcggcgatcctttcggaagaaggcgagcaggtatgctcggccagcctgcgtcaccggcagatctatcccaaacccggctgggtagagcatgacgcgcaggagatctaccaaaacgtgctgcaaacctgcggccaggtgctggagcactttgaggcccagggtgggggagagctggccgctatggggatctccaaccagcgggagaccgtggtgctctgggatcaggcgggcaggcccgtgggcaacgccgtagtgtggcaggacagccgcgcccagagcgtaacagacgcctttacgaaggagcaggccgagctggtgcgcagccgcacggggcttaaactctcgccgctgtttggcggggcgaagatcgcctatctactgcagggggacaaggccctgcgcgagatggcggacgccggcaaactgatgggcggtacggtggacgcgtacctttgttaccggctgaccggagaatttaagaccgattactccaatgccagccgcacccagctgatgaatctggaagcgctggcctgggatgaagactgcctgaagctcttcggcatccccgaagagatgctgccccggcccgtgcccagcgacagtgtgtttggctatacgacccttgaaggacggctcaaagcccctatcccggtctgcggcgtactgggggattcccacgcagccatgttcgcccagggctgccatggggtaggggataccaaggccacctatggcacgggttcctccattatgcaaaatacgggtggggcgttaaagtgggtcgaggggatatccaccaccatggcctacgcctgcggcggcaaggtttactatgcgctggagggcaacatcagccacgctgcggatactgtcagctttttgctggacctgggcgtgctgaaaaatgcggcggacagcgaggagatggcaaaggccctttccggaaacgatggggtctatctggtgcccgcctttacggggctggggccgccctggtgggatgcccatgcccgggcgctgatctgtggcatcagccgggatacgggggcggggcacctggcgcgggcggcgctggaggccatcgcctatcaggtggaggatattctggggtgtatggcccaggctggcttgcggccgacccagttaaagacagacggtggccctacagccaacgggtttttgatgcagtttcaggcggacgtcagccaggtgccggtggacgtggcggatggcagcaatctgtcgctgcgcggcgcggcgcttttggcggcgctgggcgccggggtattaaaggacgaggcagaagcggccgccctgcgccacagcgcgggccggtatgcgcctaaggccgatgccgaaagcgcggcaaaatggatggagggctggcacggcgccgtgcagcgagccaccctgcggcctgggcaatagggcatgtttccagagttgccggacggaacgtaaatgaattgaacaggaaatggacgaaagatagaggaggttttggatcatggtgtatggcgtaatcgtatccaaccgcagctttttccccgaccatctggtagaggagggccgcgcggagctattggcgttgctaaaggaactgggccacgaggtggtgaccctgacgccccaggataccgagctgggcgcggtggagaccgtagcggatggggataagtgtgcggcgctgttcaaatcccgccaggatatcgaggggatcatctgctgcctgcccaactttggcgacgaggtggcggtatccaccgctatccgccgcagcgggttaaacgtgccggtactggtacaggcctgcgacgatgcgcttgacaaaatggacctggcgaaccggcgggacgcgttttgcggcaaactttccctttgcagcgtgctgcggcaaaacggtatcccctatacgctgacgcaactgcatacctgcgcgatccgcagcccggagttccgggcggatctggaaagattcgcgggtatctgccgggtggtaaacggcctgcggcgcgcgcgcatcgcggccatcggcgcccggcccacggctttccagacggtacgctattctgaaaagctgctccagcgggacggtatttatgtgacggtgtgcgatatggccgagatgatcggccgcacggaagcgctgaaagaggaggaccctcgcgtggttcaggctttgcagaagttggcggactatgcgcccagccctgcggccaagatagaggagcgcacgcgcattgccaagctgtatgtggcgatgaaggaatacctgcaggagaacaattgcgacgcgggcgccgtacagtgctgggacgcgctggagaaatactaccactgcgccccctgcgtggtgatgagcatgctggggcaggagggcatccccctggcctgtgagatggacgtgatgggcgcggtgtccatgctggcgctgcggctggcggcgggccttgcccccggttatatggactgggacaacaattatggggacgaccgggacaagtgtgtaaacgtgcactgctccaattaccccaaggactttttcggcggcccgatcgacgaggtggggcatctggacatcctggggacgacgctaggccgggagaactgctttggcgcctgcaaggggcgggtagcccccggggaaatgacctttatgaaggcttctacggacgagtttaccggcaaagtgcgggcctatatgggcaagggcgaatttacggacgatccgctcaatagctttggcggggtggccgtgtgccatgtgccgggtttgcaaaagctgctgcataccttggcggaggaagggtttgagcaccacgtggccctgacgcgtggggattgcctttccatcctgcgcgaggcgctgggcaagtatatgggttgggagctgaccgtgcacgagggctaaaaccgcgaagcaaatatgggaaagccgccggaaatttcccggcggctttttatcggtttgatttgccggcaggtttccgctatgatgataaaaaggtataacggcggggaggcttaaaagaatgtatatgagcaaagccgataagatggtgcgcctgatgaggcgcatttttgccggcatgggcgggctttttgtggggatcgcgctggcggttgcgctgctccagtttcaaaatttagaagggcgtgtggccgtgcaggcacagatcgtggattttggaaatgggggctaccccattgtggcctatgaagcggaagggcagcgcctgacctgccagttgaactttcgatccagcagcatgcacctgggccagtcggtcacggtctactaccggccggaaaatccccagcaggccagcgtaaaggagtatctgtttccgctgatctttggcggtatcggcggggtgttcctgattctaggcagcgtagggttagcggtgctgcgccgcgggcagcggcggcgcgagcaggttttttaccacggccggcggatcaaggcccagatcaccggctatggactgaattattcggttcgcatcaacaaccggcatccatttatcctgacctgccagtattacgatgcagatagcaatacgctttatacctttaaaagccggggaatcgattacaacccgtcgcagtttttggctggtaaggaagaggtggacgtgtacgtggacggcgaaaattaccgcaattattatgtggatctgggcagcgtattgccggatgtaaaagtggtacagggttgacaaactagatagcatgtggtattaaattgcatagagtgaaggcctaaaggcatcacgaaggggtacaccaccacgggtgtaaatctctttgtggtgcctttttttgttgcggaaaggggcaaaagaagatgacggtaaatggaaagatagtagggcaggaggagcggaacttaaagcagctgctgcaaacgctggggtatgacctggcgcgcatcgcagtggaacgcaatgggcagatcgttccccgggcggagtatgcggagacggtgctggacgtggaggacgagctggaagtggtcagctttgtgggcggaggttaagcaatgcgcatcaggctaaatgggcaatggaaaacctgcgatgtgcggcgcctgcacgccctgcgggcggcggagtgcggtccggatgcacaggattttatcaccatctataacggctttgccaccccggaggatcagcccctgcaggaaggggatgaaatcgttctgatccgccagggcgagatgcccccgcgcgaggcgcttgaagctatgctgggcgcccggcatacgccgggggtgtaccagaaggtcaaaaaggcgcgcgtggccgtggcgggcctgggcggcctgggttcggctatcgcgctggcattggcgcgtaccggggtggggcagctgcacctgatcgactttgaccgggtggagcccagcaatttgaaccgccagcagtaccgcatctgccaactgggcatgtataaggcgcaggcgctaaaggaggagatcggggaaatcaacccctacgttcaggtgcaggcggactgcctgcggctgaacgcggaaaacgctgcgcaggtattatcgcgcgatgagatcatctgcgaggcttttgacggggcgcaggataaggccatgctggtggatacggtactggagcagctgccgggcaagcccatcgtggcggcctccggcatggcggggtatggcagcgctaacgccattataacccggcggctgggagaaaacctgtatctttgcggagatgggcgcagtgctgcccagcctggctggggcctgatggctccacgggtaatggtatgcgctgggcaccaggcaaacatggtgctgcggctgattttaggcaaaaaggatgtttaataaagagagatttggaggaatagaaaatggcaacggatgatattttgaagatcggcgggcgggagtttacctcacgctttatcctaggctcgggcaaatactctcacgagctgatccgcgcggcggtgcagcaggccggcgcccagatcatcaccctggcgctgcggcgggccaataccggggtggataatattttggaccatatccccgacggggtaacgcttttgcccaacacttccggcgcgcgcaatgcgcaggaggcggtacgcatcgcccgcctggcgcgggagctgggctgcggagattttatcaagattgaggtgattcgggacagcaaatacctgctgccggataacggagagaccctcaaggccaccgagattttggcgaaagaaggctttatcgttatgccctacatgtatccggatctcaatgtcgcccgggatttacgggaggccggggcggccagcatcatgccgctgggcgcgcccatcggctccaataagggactgtgcacccgggattttattcagattctgatcgacgagatcgacctgccggtgatcgtggatgcgggcatcggcaagccctctcaagcctgcgaagctatggagatgggcgctgcggccgttatggccaacacggctatcgcaacggctggggatatccccaagatggctgcagcgttccgcaaagcagtggaagccgggcgggaggcttacctggccgggatggggcgcgtgctggcaaacggcggggcggcctcctcaccgctgaccgaatttttacaggaagcgtagggagggaatgtagatgcgtgaatggaacgaccctatggtctacctgccggatatgcagcagatacccgatgatatcatgaatcaggtgcttttggcgcgggagagctacgatgaaagccgctataccgagcgggatgtggaacgcgcgctggacaaggattatctgaacgcgcaggactttgcggccctgctctcgcctgcggcgggggaatatctcgagcccatggcccagcgagccagagcggagacccgcaagcactttggcaatgccattaacctttttacgccgctgtacatcgctaactattgcgagaaccattgcatctactgcgggtttaactgcacaaacaagatccaccgggcgcggctgaatgcggcgcagatcgagcaggagatgcaggccattgcccaaaccgggctggaggagattttgatcctgactggggaaagcccgagaatgagcgatgtacactatattggagaggcctgcaagcaggccaagcgcatctttaaggtggtggggctggaggtgtaccccatggatgccaaggactatgcctatctgcacgattgcggggcggactatgtcaccgtattccaggagacctataacacccggcagtatggaaagctgcacctgggcgggcgcaagcgcatcttcccctaccgctttaacgcgcaggaacgggcgctgatgggcggcatgcggggcgtgggctttgccgcgctgctgggcctggatgactttaggaaagatgcctatgcgaccggcattcacgctgccctgatccagaaaaaatatccccaggcggagatcgccttttcctgccccaggctccggcccatcatcaacaacgataagatcaatccccgggatgtacacgagccccagctgctgcaggtggtgatggcttaccgcatcttcatgccctttgccagcattaccatctccagccgggagggtgcgcgcttccgggataacgtgatcggcatcgcggccaccaagatatccgccggggtggacgtgggcatcggcggacatacaggcgaggccaagggggacgagcagtttgagatctccgacggccggggcgtagaagaaatctataaaatgatcgtcgggcaagggctgcagccggtgatgagcgagtacatctatgtttaagctgatctgcgttacggcccgggcgctttgccgggaggatttcttgcagcgcgtcgaaaaactggccttttcgggagtggatgagatcatcctgcgggaaaaggatttagatgaggcagcttaccgggcgcttgcagagagggtgctgcccctgtgcaggcagggaggcgtgccctgcacgctgcatacctatccgcgggcggcgcaaagcctaggcgttaaccgattgcatatgcccctgccgctgcttatggaacagccggagttgagaaaagattttggcgtaattggcacctcggtgcattcgctccagcaggcgcgttcagcccgggagctgggggtcgattacgtgacggcgggccatatcttcccaacggattgtaaaaaagtgttgccgccccgggggcctcaatggctaagggagatatgccgggcgtttaacgggccggtctacgccattggcggcataaacgcgggcaatatcctatcggtgcgccaggcgggcgcggctggcgcctgcatcatgtcggggctgatggcctgtgcggatatgcggacaaaggttgccgcccttagggcttcggccggaatagacggataaaaaacaagccgtgctgagtatctttcagcacggcttgttttttttttactatgtcatggagcgagatagatagcattgcgctgctctttcgcccggtacagggcctgatcggcccgctccagcagctgagaagccgattcgcccttgcgccctgtggcgatgccggcggaaagcgtgatgggctgggcaacctccagccttgtctgcgctagataatcctgctgcatgctttggatgcggctgcgaacctcgtcagaggacatgttctcaaagagaaggcaaaattcatcccccccaaagcgaaaagcagtattgacggggcaatgggtgtggatgacctggccgacgatgcgaagggcgatgtcaccttgtagatggcctagcgtatcattgacccgcttaaaatcatcgatatccatcatgacgatatgaaaatccgctatcgcctttcgctcgtcgagatgctcgagaaaatcccgcagggccactttgttatagattcccgttaagtcatctgtcaaaagttcgcgttgaaggcgccggcgttcctgttcatttttaaggataatcaggtgacgtttattgtcaaagcgaatgatgacaaagcagataatgtaaacgaagaccaatatcagcaaggccaccagaatctctgcgtagtaatcggcaccatagactttgtccagatcccaatggatgaaaaaggcactgatcagctggagcaggacgcaggtgcccgccgtcacgctagtcaaacgcacatcacgataaaatgccgtcaagagcacgagtatggtaaggccggaataggcgtttagaaaggcaccgtggacgaaagaaagcacgaaagccgctagggaaaaagccagagataatacgtaccgcttgaccttttcggaaaggtgcggtgttcctactgcccaccaggccagcacgacgcagatcccatcccaggcggtggggaacagcaggtattttagcaggtatacctgtggcgaactgctgacaaggttattggattccagtataaaatacatggcaatttccattagcatgaccagtgctgccagcagcgacaggatgaccacgtgcagccgcagccattgggcatccaatttccggtactcatcttgtaccaaatggaatttatctaatcgatccacgcgatcaaatcctctttgtaaacaaattgccggggagaactgaacttcttccggcaaggttatcataacacagttgtggtagggttttcaattgcgaagcttgttcattttttgcgcaattcaccatataagggaaaaatgcggaatgaataaaaaaacggggagacccccgttttttagccggcaaagccctaagccgccaattgaaagataatgccgaatgcagccgccgcgccaatatagacgatggggtgcttgttaaattttttgatgcccatatagatcagcagcgccagcacaacttccttccagtggaagagattggaaagggtatagatggaggtaagcgcgcccacatccaacagcgagatctgcgctagccctaagcaggctgaggcgatcagccccgtagaggcggggcgcaggccgtaaaagatatcctgtaccaagcggctgtcccgaaagcgcttgagaaagtgggcgatcaccaatatgacgatgatgctaggggcgaccaaccccagcgttgcgatgatgcagccggggatcccagccaccgtcatgcccacatagctggacatattgaccccgatagcgccgggggtggactcggatatggctatcatattggcaaggtctgtatagctgaaccacgccgtggcatcggaaagggaatagaggaaggggatggtagccgcgccgccgcccacggcaaacaggccgatcttaaaaaactcatagaataactgcagaaagatcatgcgtttttccctcctttatccttggcaaagcgcctgccgatggctttggaaacggcgcccgccgccccggccagtaccaccaggatgatgggggagacaggcgtaaaagtagccgccaggaaaaccagcgcgcagacgatgccggtaacgatatccttgacggcgcccttgccaagcttgatgacggcattaaagatcagcacgcatacgcacacccggatgccggcaaaggcgtgtttgaccaccatggcatcggcaaaggcgctgataaaggtggcgatgacggcgatgatcacgattgagggcgcgataaagcccagtgtggcgataatgccgcccaaaatccccttgagtttaaaaccgataaaggtggaaacgttgaccgagatgatgcccggggtacattggccgatggcataataatccatcacctcgtcctccgtggcccagttgcgcttttctacgatctcgcgctgcagaatggggagcatggcgtacccgccgccaaaagtaacggcccccagcctggcaaataccccgaacaactgccagagttctttcaagtagagcacttcctttcaaaatcgttaccggttaaaatttatatattctggccaaaggcgcggcgcgctttgcgccgggctcggcttgtgttatgatggtgataaagtcacagcccaccaaaggggtatcaagaatggacctgaagcaattacaatattttgtagccatcgccgaggccggcagcatcaccgccgcggctaaaaagctccacctttcccagccgccgctgagcatgcagctcaagcttttggaagaggagatggagaccctgctcatcgagcgggggccgcgcagcgtaacgctgacggatgcggggcggcttttataccggcacgccaagcagattttgaccatggcggataacgcactgcacgacttggccgattttaaccagggcctgcggggcacgctgcgcctggggatggtatcctcctccgtcgcgccgatgctggaacactgcatacccctataccatgcgcaaaatcccggtatccgattccagatacaggagggcaccacctttgagctgctggagattctggcccgcaacatgatcgagctggcggtggtgcgcaccccgtttctggatgatggggtggtcagccatccgctggtgcccgagccgatggccgctgcagctaagccggccttttttaaggggctgcccaaagggccgctcaaggcctgccatttgcagggcttgccgctgatctattaccggcgctatgaaaccctgctgcacgccgtaatgcaggcccggggcgtggaggccgatgtactttgcctgaacgacgacgcccgtaccaccctgctttgggccggcgcgggattaggggtagcgcttttgccgctctcagcctgccgaagcctgaccggggagctagatgtgcgcccgctggacgaggtggagtggcagatatccctggcggtgatccaccgcaagggcatcgccctttccaggcctgcgcgccgctttatcgaaacctttgaaggcgaaaggcagcagtaacgtggcaccattccctactgtaggacaaaatgggtaataagtaaaatatatatttgctatttatgccatatgatttgcatatggggagaaatttgaagaaaaaaccagctatcgccagcaaaaccggccttgcagccatggcttccgggttgccaagcggggcggcggtagggtaagataattttcgggttaacacgatgtgaggaggagtatgtatgagtatttttgaggcgatgatgttgatctgttttggcctggcctggcccatgtcgatctaccgctcgtataccagccgcacggccaaggggaaaagcatcgctttttcttacgcgatcctggtagggtatgccgcgggcatcacccataagattctgtacagcccggatatcgtgctgtggctgtatgtgttaaactttgtgatggtgatggccgatacgctgctttattaccgtaacctgcggttggaccggcagcgggacgcccagacgagcggcgagtaggtatggaggaaagcgaggcacgcaggcgggagacctgcccgtgcaaaaagcacaaatgcccccggcatggggattgtaaaagctgtatgatctatcacgagcagcatccgcgctacgccccggcttgtatgaaaggggataaaaagtggcggaaagaaaaataggcaaaaagataaaagggggagaaacgatggcggttttaaaacaggagggcgacaggctggtttaccgtttcgacggggagacgctgacgattgagccttggggccgggatgggttgcgggtacgcgcggccaaggtatcccggatcgacgaggcgcaggattgggcgctgctggaacggcccacgcacggtgcggtctccatcgcgtgcgatggacagctagggcagatcgaaaacggcaacatccgctgcaaggtgggccaatatggccggctgaccttttacaacgccggtggagaaaagctcttggaagagcgctggcgcaagaaagaggattacgacgaccatagccccctgggcatcgacgcacgggagtttcgccccatccccggtggggacatgcatttgaccctgcggtttgagtcggaccgggaggagcggatctttggcatggggcagtatcaggatccgtttttcaactttaagggctgtacgctggaattggcccagcgcaacagccaggccacggtgccctttgcgctctccagcaagggctacggctttttgtggaacaacccggcggtgggccgggccacctttggcatgaactataccgagtgggtggccgaatccacccgtcagatggattatttgatcatcgccggggataagcccagcgatatcgtagagcgcctggccgatgccaccggtaaggtgcccatgatgccggaatacggcatgggtttttggcagtgcaagctgcgctaccgcacccaggaggaacttttagaggtggcgcgggagtacaagcggcgcggcctgccgctggatgtgatcgtggtggatttcttccattggcccatgcagggctcctggcggtttgacccggactacttccccgacccggcagccatggtcgaagagctgaaccaaatggggattgagctgatggtatcggtatggcccacggtggatcagaactgcgaaaactataacgagatgctggaaaacgggtacctggtacataccgaccggggcgtgcgcaccaatatgcagtatttgggcaaccaggtgtttatggaccccaccaaccccggcacgcggcagtttgtttggagcaaggccaagcagaattactttgataagggcgtgaagatcttctggctggatgaggcggagcccgagtacagcacttatgattatgacaactatcgctattacgccgggccggacctgcaggtgggcaacatctacccctgcgcctacgccaagaccttttacgatggcatgatcgcctcgggtgttgaggcccccatgaacctgctgcgctgcgcctgggcgggcatccagcgctatggggccatcgtctggtcgggagatatccagtccgattttaacgccctgcgcacccagatccccatcgggctgaacatggggctgtgcggcattccctggtggaccacggatatcggcggctttaccgggggcgaccccagcgaccccgaatttagagagtgtttggtgcgctggttccagtttgggtgcttctcgccggtattccggctgcacggataccgcaaaccctttaccatggattataaggaggcgcaaaacggcgggggcagctttggcaccggcgggcccaacgaggtttggagctatggcgaggataactatgagatattaaaggaatacttattcctacgcgagcggctgcgcccctatatccgggagctgatgcggcaggcccacgaaaaaggcaccccggtgatccgcccgctgttttacgagttcccgcaggacgaggctgcgtgggctgaggaggacagctacctgtttggcgaaaagctgctggtagccccggttacgcagatgggcgcgcgggagcgccgggtgtatctgcccaagggctctaaatggacctgcgcctggaccggccaggtttatgagggcggccagacgatcaccgcggcggcgccgctggagcacattccgctcttcctgcgggatggggctaccctgcccatccaaggatagaaataaggagttagacgcgaatgaagatcgtttcctggaacgttaacgggttaagggcctgtttgcaaaaaggctttttggatttttttgatgccgtggatgcggatatcttctgcatacaggagactaagatgcagcccggacaggcggaggtggagctgccgggttatcagcagttttggtacagcgctgagaaaaagggctattccggcacggcggtatttacccgtattgagccgctgtcggtacgttatgggctggggatcgatgcgcacgaccatgagggccgtgccatcaccctggaatatcaggatttttacctggtcaacgtctacacgcccaacgctcaggcggagctgaaacgcctgccctatcggatgcagtgggaggacgactttagaatgtacctgctggccctgaatgcccaaaagccggtgatcgtctgcggggatatgaatgtggcgcaccaggagatcgacctgaaaaaccccaagaccaaccggggcaacgccggcttttccgatgaggagcggggcaagttcagccagctgctggacagcggctttaccgataccttccgctatttctatccggatgcggaggggcagtacacctggtggagctaccggttccgtgcgcgggccaataacgccggttggcggatcgactactttctcgtgtccaaagccctggagcaaagggtgggcgacagcctgatctacgcggacatacaggggagcgaccactgcccggtggggctggaagtaaaggcgtaaccctggatgcgctgtacggtgaatgatggcacgcccctgtgctttcaatgctggatcaaacggataggacacaagcacaacaaaaggactccgcctgaaggaggcaaagaaaaagctctaaggtgatttacatgcaactcataaaatgtcaactgtgtgattttgacagaataacagatttttacaaaaatgctattgataattcttcccatatgaaccgttatagtcgttggatttatggacagcatccaactgatgaaatgataaaatcatatattgatggtggatatatgtattacgccgaagataagggaaaagtaattgcagctgttgccttaaccccatttcaaaatcaggattatcatttagtgaattggagtattgaatcaggtgataacgaagtacttgtggtacatatcctatgtgtggatccaaagaatcagagaaccggtattgcgacaaggttaatggatgaggtggttagattagcacggaacatggggatgaaagcaatacgattggatgccttgtgttgtaatgagccagcccataaattatatgaaaaatatggatttacaaaacggggaattcagaattggtatgccgagaatacaggatggattgatttctttttgtacgaattggttttaatttgaattctggtttttgcgaatagaaagacatgtgtttatgaaggtaacattacgcaaaaatgccttaagggatgattcgttaatagtagtcatgggttgggagtggctatcctctcaaggcaaacggcgtgactttagtggtcacgccgtttgcctattttactgtcatttgttaatagaggggatgctttattccgcctttagacctcggctttccaaagaccgtggaggttacagtaggcatacagggcgatagccttatcctgatccaaggtgaaatgcacctgcggcgcttcatcgggctgcaggtatttaagctgcccgcctcgctgggtttgcaggtatacccagcggatggcatgctcctgagacatggggtggtgggtggaacccacgctgacctgtagaacattgccctccacctgggaaacgggcagatgcttttcctgtgcggcttcggccgtattggggtgcaggcggtgcatgggctcgccgcagcaaccgatgggtacgcccgcgttttcgatcaggtggatcaggttaccgcaatgattgcagataaaaaattgaggttcactgttcatagctttttctcctttgcctggtttggtgctagtttacgcgctggggcggcgtttcatgcggcggagaaaatgaatattaacgatattgcaaattaattgatatgaaatattagaaatattttccgaataacattgttaaatctctaacgatgtgataaactgaaattgcttaagggcgagggcaacggcccgaaaccgaaagcacaataaatttatctttatcgtttgttctaacggcgaggggcttggccccgagcgggaagggaagcgcaaagctggaatggtactgcaagcgtattgcagggcccggcgggttgcacccttgccgggcccttttcatttgggcttaggctcccccgcaaggtcgccgcgatgggggaaggagattgttatggctatctatgacgtaaagagcaagaaggcggaagagtttattaacgacggggagatcagggaaacgctggcctatgccgaggccaacaagcataacgaggcgctgatcgaccagattttagaaaaggcccgcccgcagaagacggcgaccggttaccattgcgcggggctgagccaccgggaggcctcggttctgctggcctgcgatattccggagaagattgaaaagatctatcagatcgccgaagagatcaagcaggcgttttacggcaaccgcatcgtgatctttgcgccattgtacctgtccaactactgtgtaaacggatgcgtgtactgcccgtatcacatgaaaaacaagcatatcccccgcaaaaagctgacacaggaagaggtgcgcgcggaggtgatcgccctgcaggatatggggcataagcgcctggccatcgaggcgggggaagacccggtgaacaaccccatcgagtatattttggattgcattaagacgatctacagcgtgcaccataaaaatggcgatatccgccgggtgaacgtcaatatcgccgctaccacggtggagaattaccgcaagctcaaagaggcgggcatcggcacctatatcctgttccaggagacctaccataaagagagctatttaaagctgcaccccaccggccccaagcacgactatgattaccataccgaggccatggaccgggccatggagggcggcattgacgatgtgggcctgggggtattgttcggccttgaactgtacaaatacgaatttgcggggctgttgatgcacgcggaacatttggaggcggtgcatggcgtggggccgcataccatcagcgtgccgcgggttaaacatgccgacgacatcgacccggatgcctttgataacggcatttccgatgagatattcgctaaattgacggcctgcatccgcctggcggtgccctataccggcatgatcatctccacgcgggaatccgaggcggtgcgttccaagctgttacgcttgggtatctcccaggtcagcggcggctcccgcacatcggtgggcggctatacggaaaaggaacgtccccacgataccgagcagtttgacgtatcggatcagcgtacgctcgatgaggtggtgcgctggctgatggaaaacggccatatcccctccttctgcacggcctgctaccgggaagggcgcacgggcgaccggttcatggcgctttgcaagagcgggcaaatcgtcaactgctgccatcccaacgccttgatgacgctgaaagagtacctggaggattatgccagcccggagacctgcaaggtgggcctggaagtgatcgagcgggagatccccaagatcaccaaccccaaggtgcgccagatcgcggtggagcacctgcacgatatggagggcggcaagcgcgacttcaggttctaggagcctgtaaaggcataagcctttgacggaagggagaaataacaagatgagccttaccaatacgcccaacgccaaccggctgcacatcgccctttacgggcggcgcaacagcggcaaatcctcgctgattaacgcactgaccgggcagaacaccgccctggtctcggaatacgcgggcaccacgacagacccggtctataaggcgatggaactgcaccccatcggcccggtgctctttatcgataccgccggctttgacgatgaaggcgagctggggcgcctgcgcgtggaaaagaccgagcaggccgtggcccgcacggatatggcgctggtattgctgagcgaaggagagctttctttagaaaagcaatggatcgaaaagctaaaaaagcgcaatatccccgtgatcgcggtgatcaataagatcgacatcttgaaggacgtacaggcactggccgatagggcgcaggtggagctggggcaggcgcccgtttgcgtcagcgcgctgaaaggagaagggatccctaccctgcgggaggcgctggtgcgcgccctgccggaggattacgagcgaaagagtatcaccggagagctggtaaacgacggggatctggtgatgctggtgatgcctcaggatattcaggcgcctaagggccggctgatcctgccccaggtgcagaccacccgggagctgctggataaaaagtgtgtgatcatctctaccacggcggaccgctacgagctggcgctagagcagctggcgcacgcgcccaagttgatcattaccgattcccagtgctttaaacaggtgtatgagaataagcctaaggaaagcctgctgacctctttctcggtcctttttgccggttacaagggggatatcaatgcctttgtggcgggtgccgcggccatcgacaagctggggccggattcccgcgtgctgatcgccgaggcctgcacccatgcgccgctctctgaagatatcggtcgagtgaagatcccccgggccctgcgcgcacgctatggagagcagatgcagatcgacatcgtggcgggggtagatttccccaaggatctgtcgccttatgatctggtgatccactgcggcggatgcatgttcaaccgcaagtatgtgctcagccgcatcgaagcggcccaggcggcggatgtacccattaccaactacggcgtggcgctggcaaagctgactgggatactggataagatcagctttgccggacgataaaggaggcggctatggcccattggatggaccgtttagcatcgggagagcaatttgatacccgaaagtgggtacaaatcctcagtcagtaccagaacgaaacggtgcgtgaagcgctgtttgcccgtgcccggcagactgcaaagcgttactatggcaatgcgatctacgtgcgcggcttgatcgaatttaccaactactgtaagaatgattgcttttattgcggcattcgccgctccaacgcctgtgcgcagcactaccgcctgacaaaggaggatattttatcctgctgcgaggaaggctatgcactgggttttcgtacctttgtattgcagggcggggaggacggccgatttacagatgatgcgatgtgcgatatcgtatccgccatacgggcaggctggccggattgcgccattaccctgtccatcggagagcgcagtgaggaaagctaccgccggctctttgcggccggggcgaaccgctacctgctgcggcatgaaacggccgacccggagcactacgctaggctgcacccgcagggattgacgctggagcaccgcaaggcctgcctgtatgcgctaaagcgcatagggtaccaggtgggcagcggctttatggtgggttcgccccaccaaacgctggagcacttggcacaggatttgcagttcctggcgcagctgcgcccgcatatggtgggcattgggccctttatcccccataaggatacgccgtttagggactataaggcgggcagcttggaaatgacggtctacctgttgggcattttgcgcctgatgttgcctaatgccctgctgccggctactacggcgctgggtaccatcagccccaaagggcgggagatgggcatactggcgggggccaacgtggtgatgcccaacctttccccgctctccgtgcgcaaaaagtacctgctttacgataacaagatcgccaccggcgaggaggcggccgagcacctggccgccctgcaaagaaggatgcaggccatcgggtataccatcgtgaccgaccggggagactgtaaaccggcggcaaaggggaaccgctgctaaaattttcctgaaaggcttgaaaaagtctaatatttgatatataatatcattaagaagatgatattaataatattttaacggagggataaatgatgctgcatcctaaggtacacgaactgctgaacgaccagatcaataaagagctgtattccgcctatctctatatggatatggccaactactatcaagatgtaaatctgaatggctttgccaattggttcaccatccagacccaggaagagcgggaccacgcgctgctgttcatgacctatctgcagaataatgatgggaaggtaaccttaaagaccgtggatgcgccggacaaggtgttcgactccttccgcgcgccgctggccgccgcgtacgagcacgagcagtatgtgaccagcctgatccacaacatttacgatgcggcgtttgaacagaaggatttccgcacgctgcagttcctggattggttcgtcaaagagcagggcgaggaagagaaaaataccgacgatctgatcaagcgctttgacctgttcggcagtgacgccaaggggctgtacatgctggatgcagagctgggcgcgcgggtgtatgccgccccttcgctggtattgtaatgctggttgatctattcatttgccccttgtttaacgcgatttgttgaattcataaagaacggcccctgcgcaaacaatcatgcgcgggggccgttttttgccttcttctaaggagcgggtgggttaaatctccaccagttcatagtccatattacccaggccgatcttctgcccgtgctccaactggcactgccagcggacgaccgggtgcacggcggtaaagttatcctcgccctcgtggcgctctttatccagcatgctgcccgggttggcgggctgagcgttgaacagatccgcacaggcggcgtccagcgctaccgggtcaaaggaggccagcatgcccacatccgggacgatgggcacatcgttttccgcgtggcaatcgcaataaggggatacatccacgataaagctgatgtggaaggcaggcttgtccttgacaacggccagggtatactcggcgatcttcttgttcagaatgtcaaacgcctcgtcctgcgcggcgtgtaccgcatccgccgggcatacgccgatgcagcggccgcagcctacgcacttgttatggtcgatctgcgccttgcgctctacaaaggagatggcgtcgtgcgcgcagtttttacggcaggcgccgcagctgatgcaatcctcctgctgcacatagggcttgccgttggaatgcatctccattttgcccgcgcgggagccgcagcccatgccgatgtttttcatggtgccgcctaagcccgcctcttcgtggagcttaaagtgggtgatggagatcagcacgtccgcatccatcaccgcgtggccgatcttagcctctttaacatactcgccatcgatgggtaccagcttttcatccgtacccttgagcccgtcgccaataatgacctggcagcccagggtaaagggattgtaaccgttctcataggcggcgtccagatgatccagcgcatttttgcgccggcccacgtacagggtattacaatccgtcataaacggccggccgccctgctttttgaccagatccacgatcaccttggcataattgggccgcagataggccaggttgcccggctcgccgaaatggatcttgatagcggtaaacttgtttttaaaatcgatattttcgataccggccgttttgaccaggcgctccagcttctggagcaggttctcgtcaaaagtggcgtgaaaatcagtaaaataaaccttggattttgccattttttcttctcccctttacatttatacaccctattacaaatttgcaagactattttataatatcattttctaatgttttttcaagggtatatgcaagaaacttagcgcttgctaaggttttctggcagaagcccccattttaatagaattgtgaaaaattgtgcaaaccgttgacgggacgagcggggcgcaattatactcaaatggactgtgactgaccagtcagtcaccttcggccccctggggatggggactaaaggaggagcggatcgattatgttatccaaattcagcgtcaaaaagccgatgaccatcatggtcgccgtgatcacggtgatcgtgctgggcatcatttcctttacaaaaatgcagacggacctgctgcccagcatcaacctgccgtatgtggcggtgatcacgacctatcctggcgccagcccggaaaaggtggagcagggcgtgaccaagccgctggaagccgggttggccaccaccagcggggtggaggaggtcactagtatctccagcgagaacatgagtatggtggtactcaagttcaccgagagcaccaatatggacagcgccatgatcgagatgagcggcaaggtggatcagatcaaaggccggctggacgatgcggtgggcacgcctcagatgatgaagatcaatccggacctgatgccggtaatggtagcggcggtggatgttgacgggctgagtcaggaggaagtatcccagctggtcagcgaagaggtcatcccctcttttgagcggctggatggggtggcgcaggtcagctccatgggccttgtggaaaaacagctgaaggtgacgctgaatcaggagaagatcgacgcgatcaacgataccattttacgatcggtagacagcaagctggcggatacgaaaaaagagttggatgagggtgaagccaagctcaaagatgccaagagccagctggaaagccagaataagacccagacccagaagctgctggacgcagaagagcagcttaacgaggggcgctcgcagttgaacagcggacgcgagcagctcaatagcgcgcttacccaggcgactgataagcgcgcagatttggaaacacaaaagcaactggcggatgtcgctatccaaaaactgcaggagcaggggctggaagtgccccaggaactgctggatacccaggcgcagctagctgcggggctggaggcggcggacgcgggtatcgtccaaatccagcagcagttggaagagcttaaaagcaaagagagcgagttgaataaggggcagacccagctggagcagggcaaactggcactaagccagggtattgccacggcgcaggcgcagctgctggtgcaggagggaaagctggccgagggccgcgcccagttcgaccaggccagcgagggcgcctacgagcaggccaacctttcgggccagctgaccaaggataccattggtcaaatactctcggcacaaaacttctccatgccggcgggcaatatcgtagaggatgaaacggcctatgcggtaaaggtgggggatctgtttgaaaacgaggaagacctctcctcactggtgcttttcaacctgggcttagatgagctggatatcgtaacccttgcggatgtggcggatatcagctttaccgataacagcggcgagacgtatgcgaaaatcaacggcaacgatgggatactgctcaccttctccaagcagagtaccgcctctacggtggaggtatccgataagctgcgcgagcagatggaaaagctagagcaggaatatgaaggcatgcacctgaccgcgctgagcgaccagggcgtttacattaatattgtggtcaactccgtgatggagaatctattgtggggcggcctgctggcgatcctgatcctgctggtcttcctgcgcaatgtgcgtccgaccatcgtgatcgcgctgagcatccccatcagcctgctttttgcaatagcgctgatgtactttaccggggtcaccctcaacattatctccctggccggtctggcgctgggggtagggatgttggtggataactccatcgtcgtgatcgaaaatatctaccgcatgcgggcccagggcctttcggccgccaaggcggcggtgcggggcgccgggcaggtggccgcggccgttacggcctctacgctgaccacggtatgcgttttcctccccatcgtctttaccgaggggctgagccgcgagctgtttaccgatatggggcttaccatcgcctattcgctggtggccagcctgatcgtttcgctgacgctggtgccggcgctttccagctggctgctgaaaaagccagagaaaaagggccaccgcctctttgataaatttaccgctgcctatggcaaactgctggcgctggcgctgcggcgcaaatcggtggtgctgatcctggcgctggttctgctgggggttagtatttatggctcggtgcagatgggtacggcctttatgcccgagagcgatagcaaccagatcgccgtgacgatggaaatgcccaaggacagcaccacccaggagactcgggatatggccgacaaggtagcgggcatcgttgccgaattgccgggcgtggacaccgtgggcgcgatggagggcggcgggctgatgagcggctcctcctccggcggggcgatcagcatgtacgtgattttggatgaacagcgcgaccagaattccaaggccatcgcccagaatattattgacgcgaccagcgaactgccctgcgagatcaccgccagcggtaccggtatggacagtatgactgagatgatgggcggctctggcatccagatcgacatctccggcgacgatatggaccagcttaaagccatagccaaagatgtggccgccatgctctcggaggtggagggcacccaggagatctccgatggcatggaggacgccgagttggagacccgggtaagcgtggataaaaataaggccatggaatacgggttgaccacggcgcaggtctaccagcagctggctgtcgaactggtgaccgagaccacggcgaccactgtgacgctgggcggggaggattatcccctgatcgtcgcggatgacccgggcgcggcgctgacgcgcgaaacgctgggtgagctcaccctttcggggactaaggacggagaggctgttgacgttcccttacaggatatcgcgcagattacccaggcgcagggactgaccagcatcaaccacgagaaccagacccggctgctgtctgtcaccgcggcggtggacgcgcagcataacattggccttgtcagccgccaggtcgagagcaaactggccgactatgaggtgccggagggctacgagatcgtcatcgcaggcgagacggagatgatcaacgacacgctggagcagctggtgctgatggtggtgctggcggtggtactgatctacctgatcatggtcgcccagttccaatccctgctcagccccttcatcgtcatgttcaccatgccgctggcctttacgggcggattgctggcgctttggatgtgcgggatggagatcagcatggtctcgatgctggggttcctggtgctggccggtatcgtcgtaaacaatggtatcgtctttatcgattacgtcaaccagctgcgcgcttccggcatggaacggcgtggcgccctggtgcgcgcgggccagacgcgcctgcgcccgatattgatgacggcgctgaccaccatactgggcctgacgactatggcgatgggcatcggcatgggtgccgagatgatccagcccatggcggtggttactatcggcgggttaagctatgccacgctgctgacgctgttcgtggtgcctgcgctttacgacatcatgcagcgtcggccggtaaaaaatgtacagttagagggggagcaagttgaccaggcgttatagtgaaaaggagaccgccatctttgccggcgtcatggagttgatgcgccggggcgaagatctgtatgccatcaaggccgcggatatcgccgccgcggcggggattggcaaggggacgctgtacaactattttgcttccaaaaaggagatcatcctgcaaaccctgatctataacctgcataccgagctggagcgggtgacggcacaggtaaatgaagcggacacgtttatagaaaagtgccgcatcgccttggcctttgtagaaagcggagagcgcaaccgcaacagcatcatccgctatatcttcctgggcaatgccggcgaggatgcgcaggccttggtgcttgaggggatgcaagccatccgcaaagagaaagagcggctggcggattgcttttcccgcgcggtggcctgcggcgcgcaagaagggctgtttgcgccctgtgcagacttggcctatatctcgcaggtctttatcagcgcgctgatgggctttgcccagtgcatctgccaggaggcaggccattcttcggaagatgaagtagaacgttaccggcaaaatgcctgccggatgattgtaaaggcattgcagtaaaaaataggcgctctgattttgaccggagtgccttttcattgtataatgggggagctttgcagtttgaacaaacgagaagggacgctgaatatcaatggctcgcagacgctacctgatcctggcgaacagttttgttatcctcctggtcatggggatctcctacgcctggtcgatctttgtcggccccttggaggcggatttcgggtggaaccgtgcgcagacctccatggcttttacgctgaacctgatcgccttttccggcgggacgatattgacggggatcctctcaaagcgtatctcctttacccggatcatccagatcggcgcggtgatgctgggcacgggctttttgttgaccaccctgatccagaccccctggcagctgtacttaacctatagcctgctgtgcggcggggcggtaggcatgtgttacaatgccattgtatccaccgtgccgctgtggtttctggataaccagggcgtggccaccggtacgctgattatgggctatgccttttccagcagtatattgggtcctgtttgtcatgcgatcatcaccgcccaggggtggcgggccgcctttgtggtgctggcagtggttaatatggtgatcctttttgcgggcagtttcttggtcaaagtgcctacgggcgaacagctgacggcgctaccgcagccggccaaagcggcccgcctgggcaagcgggattttaccgccgggcagatgatcaagacccgcagtttttacctctatttcttctatgttattatcctggcgggcgtgggtcaggtgatcatcaaccacctggggccggccattagccaggatatgggccaatctgccgcgtttgccgcgggcgtagtcagcgccatctccatttgcaatggcgtgggacgcgtgttttggggcattgtgtttgataagatcggcactaaaaagacgctgctggtgatgtcagccatctatacgctggtgttggggctggtctacctggcagttgtgatgaaggcggccatgctggcagcggtggcgggttgcatgctgctgttcacctatgggggcaacgctacgacgatccccaccattacgcgcaagctgtttggcgagaagcacttttccatgaactattcggtgatcagcctgaccaaccttttggccgcgctgatgcccagcatcgccgggatgatgcagaccagccagggcaactataccatggcgtttttaagcatcgtgatctgcagcgcgctatcgatcggcctggcggccatgatgaaaaaggaagattaaactaaccggcccagctttttcgacatagagcggcggttgctttaccatgcgcgatggcctatactaagcataaggaatgaaagaaagaggatacggaggacgatatggctaaacggatgcaaaagatcggcgccattggcgccttgttggcgatatgcgtagccttgagcggctgcggacaggaggcgccggcggccagcgcgacgccggaggcgcccacgcaggcggcacaggagaccccggaggccacaccccagcccagcgcgagcgcggcggacgatgaaacgcgcgcgcaggcactgcaggatgcggcgcagaacgtggcacattatctgtacgaagagctggaacccaaagtagagccttattcgggtaaggcgcaggacaaactgacgctagagggcaagacctattttgcctataccgtgcgcgatggcggggacgggacggacctgggatatgtcgcggtatcggatgagggcacggagaattactttaaaggcgtggacgatacggaatttaaaaaggtatattagtgcttgtcagaatatagcgccgcggctgatggatgccgcggcgctttttggactgaaaacagaagggtttacccccaggctgcggttgacagggccgggcgcgaagggcataataataagggcaggtaggacctggacgtttaataaccgggttaaaataggcgccgccgtgaaaggaagcaaatgaccagggaggacgtgctttacatttcggatatggatggcaccctgctgcgcggagatgccacgctttcccccgcgtctcgggagaagctaaagcggatgctgggcgaggggctgcgctttaccgtggctacggcccgttcgcatcattcggccctgcagatcttggaaggggtgcccctgaacctgccgctgatcgccaacaacgggctgacgctggtcgccccggatggcagggtgatcgaccgggcgctgctgaccccgcacgagagcaggctgatgattgaggcttaccttgaggcagggcttttgcccctggccatggtgatggaggcggatggcagccagcgggtgtatcatccgccggcgcgggacgaataccaaagacagtacctggccgggagaagctccgatccccggctgcgggagaccggcgatctgtacgaggtggtggagatgccggtggtatccatcaatgccaagcaaacctttgcgatcatgaatccactgtgcgaaaagttccgccaggcgggcatcggctgtcatttttccgaggatatctataccccggggctgtggtggctggagaccggcaacgctgccggcagcaaagcggcccgggcgctgcagttaaaggagctgaccggggcaaagcggctggtctgttttggggataacctcaacgacctgtctatgatggaggcggcagatgtggcgctgacggtggatgaaggcaaggcgcaggtcaaggcgcttgcaaaatacgtgatcggaagccatgaacgggacgcggtagtccggtatatggagaaactttgggatgaaaaggagagcctaagttaagtggaaacgttgaattttgaaaaggccatggcggggctgcccgcccttccggatgcggaaaagatcgatgcgatttggaaagcagcgctggagaagatgcacggcgtgcgcatcatggtactggacgacgaccccaccggcgtgcagacggtgcacgatgtccccgtgtttaccgattggagcgaggaggccattgacgcggccatggcgggggattatcctttgagctttatcctgaccaactcgcgggccttctccgcgcaggagaccgaaaaggcccatgaggagatggcgcagcgcattgccgcggctgcaaaaaagggtggttatggttacctcatcatgtcccggggagattccaccctgcggggacactacccgctggagaccgacgtgctgcgccgcaccatggagcgggcgggggataaggtggatggcgagatcatctgcccctactttgccgagggtgggcgctttaccattaacagcgtgcactatgtcaaaatggggcaggagctggtgcctgccggggagaccgagtttgcccgggatgcgacctttggctaccgtgccagtgacctgcgcgattgggtagaggaaaagacggctggacagatccaggcggcacaggtagaaaggctgaccctggcagacatccgcagcggcgatgttgaagggatggctaagaaattagccggcttaaacggcagaacgctggtggcagacggcgtgtgcgaaggcgatatgcgtctactctcggctgccatcgcgttggctgtggccaggggcaagcgctttatcttccgcacggccgcgggcctggtcaaggcgctgggcggcattgaatcacggccgctgttggggcgggaggagttgcgcctgcccggcggcaagggcgggttgatcctggtgggatctcatgtgcaaaagaccactgcacagcttaacagcctgctggagctggagggcgtggtgcagcgggagtttgatatcacaaaaccgcttgagcaagagtcccgcgcggcccgggcttgggcccaggaagcgctgcaaaagggccaggtggcggtgatttacacctctcgtaagcgggcgcaggtgcccggtgggccggaggaacagctcaagttctcggtggcggtttccgccgcggtgaccgacatcgtcaagcagttggaggtaacgccgggcttcctcatcgccaaggggggcataacctccagcgatatcggcatcaagggcctgggtgtaaaaagggccatggtggccggccaggcggccccgggcatcccggtgtggcgctgcggagaggagagccgctttcccgggcttagttacgtcatcttccccggcaatgtgggggatgaagatacattgcgcaatatggttgcggggctgcgttagccttgcgaaaatgtaaaggagagaacaaaatgggtaaaaaagtagctgtggtccataccagcctggtctcgatcaacgagcttaaggcgctgtttgccgagatcctgccggacgttacgatgtacaacatcatcgatgagagcctgctggcggaagttaaagccaacggtggggtgaccccgggcatccagaaaaggatgaacgcctattatgtttgcgcggattcgctgggggtagacctgatcctcaatcagtgttcctctgttggcgaggcggcggacatcgcggccaagcagatcaccaccccggtgctcaagatcgataaacccatggccgaggaggctgtgcgcctgggcaagaagatcgccgtggtggccacggtagcttctacggtagccccgtcggtacgcaacgtggaaaataccgctaaggaaatgggcaaggaagtggaggtcgtcccctatctggtggatggcgcactgaccgtactgatggaagctggcgggcaggaaaagcacaacgccatggtgatgggcgcggtagaaaaagccgcccaggagtgcgacgtggtggtgttggcccagggttctatgacggtattgatcccgctgctgggcgacatcaaagtgccggtgctgaccagtccgcgcatggcggtcgagcgcattaaaaaagaactgggtctgtaaaggacggtaaaaaaagctccggaatcttccggagcttttcttgattgctttttattgcagcaaagtgaccaggccggataccgccataaagccatagatcagcttttgcagatgatccgcgcgaatctttcgggcaaagcggcgcccgaagaacatgccgaagatgacgaccgcaaggcccatggcaaagtattgcagcacttccagggtgatcactccgctaaaggcccgaagcgcggtggtatacaggttggtgatcagcgaaaagccctgcatgttggcaaaatactgctccccgtcctccccggcggtggagagaaaatagaccacgaccggcggaccgcccatgccgaacagcccatcgagcaccccgctcagtcccccggcgatcaaccccgcgtgcagtgaagggcgaatgtggattttagaggagaaaaagacgaaatacaggctcatggccaccagcaccccgcccaagcattttttgagaaccgccgcgggcatggcgcccgccaccaccagtaccataaccgcgctgaccaccaggtagctggccagcgtgggcagcacgtgccgccatacgatctttttgcgcatgcgtatggccataggcagcgtcatccccaacgagagcatgaccgaaatcgccaccgagatctgcggactgggcaggaaaaaggggaagaccgagatcacaaaaatgccaaagccaaaaccgctgatggactggatcaggctgccacccaacacagaggccaaaaacagtgcgataacggtgaagtccaagggcatagcctccttttagcctaaatttatacaaaaataaccatatcataacaaggccgcactggacaagggcttggcatgcgggcacatctaattttgtggcaaagcggatgtaattttgggccagatgcgctaaaataaaggcaaattcagcaagagggggcgggggcttggcggcaggcaagcgggagagagaagtggaactggcgctgacagaacaggtcatggtgcaggtgatctggcgcaagcgcagaacgatgacgttgcgggtggaaccagacggccgggtgcgcatcctggtgccctggcatgcccgcagccaggacgttttgcggtttgccaaaggccatcttagctggattttgcgtcaccgggaagaagtacttgcgcgccaaagggcgcggtgcaggcttgtatcgctctcgggcggcgtgctgcctgttttaggggaactgacgtcttaccgggtagaggtgttgccggggcataaggacgaagtgcgagctgaagtgggcggcctttgcgttaccctgggtgcggcccaggagcagcagctgcgggaggccctggaaactcatcttaaggcagtggcaaaagagacgatcgcccggcggataggcgtttaccagccctattttacctgtgcgccccgctcttggcgggtgggtagcgccaaaacgcgctggggcagttgctccgggcagaaccggctgaatttttgttggcggatcgctatggcgccattaccggttctggattatttggtggtgcatgagatgagccatatggagcatcatgaccattcgccggccttttgggccaaggtggcgcagatcctgccggattacgcgcagagacgccgcattttgcgcgagcagggcagcatgtggggattgaattagagaaagccataagcgggatcaaggaattgaatatgggttctgcggagcttatgggtggatcctgcggctatatttctcgtatcacgatgtgcaaaaggcgcatttgtggtatgcttttgatatggtaaactgtgtgtttagacgcggcggcgaataagacggataaagggggagaaaaaatggcattgttacacgtaaactttttttcggatgtattggcgattagcgcgtccatggatgtgatcctgccgcaaaaggtgagcaggcaggtgggtatggggtcggctggatcggataagccgctgccggtgctctatttgctccacggcatgagcgacgatcataccatttggcagcggcgcacctctatcgagcggtatgtggccgagctgccgctgatcgtggtgatgcccaccacgggccggggcgcttatacggatatgaaacacggctaccgttactggacctatatcagcgaggaactgcctcagatcgtgcatgaattctttcctcaggcctcttggcggcgggaagatacctttgccgccggcctctcgatggggggatatggcgcctttaagctggggctgcgctgcccggataagttcgcggctgtggcggcgcttagcggcgggttgattcgggattcggagcacatgctgcaaaacccggtctcgcaaaacgactttgccatcacctttggcacgctggaggagtatcgtggcagcgataacgaccttttggcagtgggcgagcgccagctggccgcaggcgtaccgctgccccggctgtttatgtgctgtggtacggaggatgcggcctatccgcccaatgtacggttttacgagcagtttaaagaccggatggatatcacctggtttgaggagcccggcatccacgaatggggcttttgggaccggaacatccaaaaagtgctggattggctaccaatagaagggagatagacgatggaattattggaagggatcttgacgcggcgcacggtgcgcaaatttaccggcgaaaagttgagccatgagcagatcgaaaagctgatttaccacgcctcgcacgcgcccagctgggccaacagccaatgtgtgcgctttgtggcgctgacggaggatgcggcccgggaggccatggcccgccaggcctgcacgggcaataacgtcaataacgtgctgggagcggcggtggtattcgtcctttgcggcgtaaagggaaagagcggatacctgggcggcaaggtagccagccccgatcctgcgggatggatgctgttcgactgcggcggtgctgcggaggcgctttgcctggcggcgcacgggatgggcctggggaccgtgcagatcgggcattttgaccagcaaaaggccggagaactgatagggctgccggaggatatgcaagtagtggaactgatcgcctgcggatacccggcccagacgcccgataagcccaagaggctggaagtggacgagcttttgcggtataatcatttttagagtgccggggcgtaatgccctgtggaattttaaagggggacttgaaaagtgttgacggtattgatcccagaacctaagaagcttgaggtagcggacctgcccaagccccagatcacccagccggacgaggtactggtgcgggtgctggcgggcggcatttgcggcagcgatctgcacatctaccatggcacaaacccgctggccacctatccgcgggtgatcggccacgagtttggcggcgtggtggaagaggtgggcagcgctgtatcgcctgagcgaattggccagcgcgtggcggtggatccggtggttgcctgcgggcagtgctacgcctgtaagatcgggcggcacaatgtgtgttctaccctggaggtcatgggtgtgcatcgggatggcggctttgccgagtacgtggtggtgcccgaaaagaacctgtacaccttctccaaagaggtggacgataccatgctggcgctggtggagccctattccatcggcatgcagatcaacgcgcgcgggcagatcggccagggcgacaaggtactgatcatgggcagcggccccatcagcatttgtgcgctgcaagtagcggtcagccggggcgcccaggtgatggtaacggacgttttgccccagcggctggagcgggccaaggccagcggggccgcgcgggtggttaacgtaaaggaagaggacctggaaaaagcggtgatggaatttaccgatggcgagggcatgccggtcatcatcgatacggtatgcgcggtgtgtacttttgagcaggccgtgcgcctgtcctgcccggcggggcggatcgtggtcatcggcttaaacgccaacccttccgccattgcccaatccgaaatcaccaaaaaggagctgactatcgtaggttcccggctgagccgcgcgcgctttggcgaggtgatcgaggcgttggaggcgggcaagctcaagcctgagctgctgcgctcgcatacctaccctgcggcggatatcaagcgcgctatcgagcagatcgaaaatcatcccgaagaggtatgcaaggtaacgctgacattctaataaagatatagtggtaaaggcgctccgttaaggggcgccttttgcttgagatgccggtctacggaacgtggattgttctaaggtgcccggaccgttataatgggggaaacggcctttggaaggggagatgagaatggattgtgcaaaaatcgggcgtctgatcgcccgtttgcgaaaggaaaaggggctgacccaacaggatattgccgacgccctgggcatcaccaataagacggtatccaagtgggaatgcggtttgggctgcccggatgtggggctttggcctgagctatccgtcatactgggcgcggaggtgccccagctgatggagggggagatcacccccaataagccggacagcgggaatatcgagcgggtgcgcttttacgtatgccctacctgtcataatgtgctggtcagcaccggcagcgcttcgatccactgctgtggccggaagttggagccgctgaaggtgattgaggagcaggagtcccccaagatcgaggtggagaccgtggatgtggattactatattactatcggccacgagatgacccgggaacaccatctgctgttcgccgcctatatcaagagcgacagggtctttttgacgcgtctgtacccagagcaggaggcggccgtgcgggttcccaatttggggggcggcaagctttacctttactgtacccggcacgggcttgccctttaccgccttagacgcggggcgaaagcttgatagcgccaattccaaggccagggaatattccctggccttgttgatacgaatagatgcgcgcttgaagcaagttttggagaattctggcggcagaaggggggaaattacgaggcggcagggcagaaacggcagaaatttgtaaaaaggcgctttacttcgctaatgcaatagtgtataataggcccgtaacacatcatgtgagaggggtattcaattatgaaggcaaaggcaagtaagttattgttggtcgcgctggcggcagttatgttgctgggatgctttggctgtcagagcgaggcggcggacaattctctgaactatatcaaggaaaacggcaagctgatcatgggcctggacgattccttcccgcccatgggctttagggatgagaagaacgagatcgtaggctttgacgtggatatcgccaaagaggtgaccagccgtatgggcgtggagctggtgctgcagcccatcgattggaaggccaaggagatggagctgaagaacaagaacgtagacgtgctctggaacggcttcaccatcaccgaggagcgcaagcaggagttgaccttctcggagccctatatgtataatgagcagattatcgtagtcaaggcggattcttccatcgccagcaaggctgacctggccggcaaggttatagccctgcaggacggttcctccgcggtagacgcgctagataaggatgaagcgctgaaaaattctctgaaggatacggtcggctttgccgataatgtaaaggcgctgatggatctggctaacggccaggtggaagcggtgttggtggactcggtggtaggtaactactatgtgagcctggagagcaacgcgggcaagttcaaggtgctggacgatgtgctggcgcaggaggaatatggcattggcatgcgcaagggcgataccgcgctgaagaacgagatcgataagatcatccaggagatgatcgacgacggcacctacaagaccatctctgagaagtggttcggcaaggatgtttccattaagaagtaatgtaaaataatgggctatgaggcaggccgctcggttgacgcggcctgttttcgccttaccaggagagaaaaatgatctactttcaggatatgtcccggttgggagaccttcttcaatccctttgtatgggttcgttgaccacgattgaactcttcgtgctcacgatcctgatcgcgctgccggtgggctttgtgttggcgctgggcagtatctccaagcgcaagccgcttaaatgggtcatcaacgtttatatactggtgatgcgtggcacgccgctgatgttgcagatcctgttcgtatatttcggcatcggcatgctggggatcaagatcgaccgttttctggcagcggtgttgtcgattaccatcaattatgcggcctacttcagcgagatcttccgcggtggtatccagtccattgaaaagggccagtttgaggcagcggatatgttgggtatgacctatgggcagaccatgcgcaggatcgtgcttccgcaggtctttaagcgcgtgctccccagcgtgggcaacgaggtgatcaacctagtcaaggatacggcgctggtgtacaccatcggccttagcgagctgctgcacgcgggcaacatcgccatgatgcgggacagcaacatcatccccctggtcatcgccggcgttttctatttggtgatgaacgccctggtcaccaaggggctgcactggaccgagtcgaaattcgactattaccgctaggagggccgatatgcagggacaagaaatgttgaaggttgagggcctgtgcaagcgctttgggcagctggaagtgctgcgcggcgtgggcctggaggtagaccggggcgaaacggtggcgatcatcggtccctccggttcgggtaaaagtacgcttttgcggtgtatcaattatcaggaaaagatcgaggcgggcagtattatcgtcgagggcgcacccatggtgcaagatggagtctatgccggggaatcggagattcgcgctatgcggcgcaagatgggcatggtgttccaaagctataatctatttccgcacctgagtgtgaagcgcaacctgatggaggcgcagattgtggtgcagaaggcagaaaaggcggctgcagaggcggtagccatggagatgctacaaaaggtgggcttggcggataaggcaaatagctacccgtatgagctttccggcgggcaggcgcagcgcgtagccatcgcccgtgcgctggctatgaagccagacctgatgagctttgacgagcccacatcggcactggatccggagctgacgggcgaggtgctcgccgttatgcgcgatttggcgcgggagcatatgaccatgttggtggtcacccatgagctggcttttgcccgcgaggttgcagatcgggtgatctttatggccgatgggctggtggtggaacagggcacggcgcaggatattttttataacccgcagcatgagcgcaccaaagcctttctcaaacaggtattggcgttataaaagcggcggacaggcggatggggaaaggcccatccgcttttttattgtgtgttgcaaaactggccaaaacagcgataaagatgggatttaagatggcataaacgaaagactacataaaagggacggccctttcgcggatgaaaaccgcacgctattttggaaacacttgacagtgaaaaatcggatgtgctatgctgttaacggtgttagctaacagtgttctctaaagacggaggaaatatgcctagggataagactgcggcccatgaaaagatcgtgcgggccgccaaacgggagtttttagaaaagggatttaagcaggcctcgatgcggagcatcgctgcccgggtagggatgagcgccgcaggcctttaccggcattttgccgataaggaggcgctgtttgccgcgctggtggcaccggctttggcggccgcagagagctggtttgcggcccatcgagcgcgggaatatgcccggctggatcagaacgatcttgatgccatgtgggaagagggcgcggacgcggcgatgatgatggaggccgtttatccgaactttgacgcgtttaagctgctgatctgccgctcggaagggacgcggtatgctaactacttgcacgagttggtgatgctggaacaaaaggaaacgctttcgtttttggatgaagcgcgaaaaagaggctatgccgttaatgaggtgcgcgaagatgagctgcacctgctgttgagcgcttatgttacggcgctttttgaggtagtggtgcatgactttgccccggcggatgcacaacattatttgcagacctttcaaagtttcttttatcccggctggagggctatactgggaatttgatagtgtagccttttctttttgcacacaatagttagttaaaactaactaaggaggtggagacatgattgctggacgtttaagaggactaactctgccgccctaatagggggattaatcgggaacccttgcgggtttgtagatcttatgccctgaaggagaggacaaaggaggtatggacgtgaaagataaaaataagaatagcatcgccaggcttttaacttatgccggcggccataaaaagctgacgctattgggctgcacgctctcaggtgtatcggctgtgttagcgctggcgccctacatctgcatttggtttgtggcgcggggcgtattccaggcgatgccggattacgcgcaagctcagggccttgttcggtacgggtgggcggcactgtggtttgcgttgggcagcgcggcggtatattttgcggccctgatgtgtacccacctggcagctttccgcacggctaaaaacatgcgcaaggcggcggccagacacttggtaaacgtgccgctgggctacctgaatgccagccaatccggtaaactgcgcaagcagatcgacgataacgcggggatgaccgagcaaatgctggcccacgaactgccggatctggtcggagctgtgataacgccggtagcggccgtggcgctgcttttcgtcttcgattggcggatgggactggtctgcctggtgccgatgctgatttcggtctatctgctcacccggatgatgggcggcaaaaacgccaggttttttagtacttatcaaaaagccattgaggatctaagcgcggaagctacagagtacgtgcggggcatcccggtcgtcaaagtcttccagcagacggtttactctttcaagagcttttatgcctccatcatgcgctacagtaaactggctacggattacgcgctgtcctgtggcaaacccatgacgggctttaccaccgtgctaaacggtacgtttttgttactgatcccgcttgggatgctgctgtgcagcggtggcggctggccggtactggtggatctgatattctatatcctctttacgccgctatgtgccacgatgatgatgcgcattatgtacgccgggcaagcgacgatggaggcagacgaggctgtgcgcaagctggacgagatattggccgtgcagcctctgccggagagcggacgcccacagcgggccaggggtgcggaggttgaactgaaaaacgtgacctttacctatccgcaagccaaagcgccggcgctgcgccaggtttccttccgtgtacgggcaggccaaacagtcgcgctggtaggcccatccggaggcggaaagaccaccgcggccagcctgatcccccgattttgggatgtacaggaaggacaggtgctgatcggtggcgcggatgttcgcgaactggcgacccaagaactaatggatcaggtggcgtttgtatttcaggatacccatttatttaaaaccagcctaatggaaaatattcgggctgccaggcccgaggccacgcgggagcaagtgttaaaggccctgcatctggcccagtgcgacgatattttggctaaactgccgcagggtttggatacccagatcggtaccaagggcgtgtatctttcgggcggggagcagcagcgcgtggcgttggcgcgcgctattttaaaagacgcacccatcgtcgtgctggatgaagctacggcctttgcagacccagaaaacgaactgctgatccaaagggcatttgaaacgctgatccggggaaagacggtgctgatgatcgcccaccgcctttccacgatccagaacgccgatgaaatcttggttctgaaggatggggccattgccgaacgaggcacccaccgggcgctgcttgatgcgcatgggctgtacgatgcgatgtggcaggactatcaaacttctgcacagtggaaagtgggaaaggaggcagcggtatgatcgcaaagatccaaaaggcatatgccttgactacacagggcgcaaaagatttggtcaaggcgacgttatggaccgtggcggccaatttgagcctgatgattccggtgggcctgctggtgatggcgctgggcaatatcatttcggctctgatgacgggcggcgacccggcccagggcgtgtgggggctgacggcccttagcgcactgctggtggctgtgatctatatcgtccactggttccaatacaaggcgttgtatatcgcaacctatcaagagagcgccaaccggcgtatccgtttgggcgaaaagctgagagaactgccgctatcctttttcggtaatcgggatctttctgatctgacggcgaccatgatggcggattgcagcgccctggagcaagccttctcccactatgtgccccagctatggggaacggtgatttttaccgtactgatcgccatcggtctgctggcgatggactggcgcatggggcttgcggtgctttgggtggtaccagtagcctttgcgctggtactaggctcccgctttttgcaggaccggttcagtacccgcaattttctggccaagcgcagggcgaccgatggactgcaggaattgctggaaacggtgaaggatatcaaagcctgcaaccaaaaggagcggtatcttcaggggttggaggagaagctggaccaggctgaaagggcgacgatccgttccgagctggttacgggcagctttatcacctctgcacaggcatttcttaaattgggcttggccacaacggtactggtgggcgtaagcttgctgatcgagggcagcttggatctgacggtatttttgatctacctgatcgcggcgtcgcgcctatacgaccctatcagccttatctttatgaatatggcggcggtattcagttcacagatccggatccagcgtatgcgggagattgaagagcaggcggtgcagaccggcaccagggagtgcaagccccgaaattacgacatcgtatttgaacacgttaagttcgcctatcatgaagatgagggcgtgctggaggatgtatcctttaccgcccggcagggcgaggttacggcgctggtgggcccctccggaggaggtaaatccactacggccaagctggcagcccgcttctgggatgtcaacgaagggcgcattaccctgggcgggatagacatttcccgtgtggagcctgaaacgctgctgcagagcttcgcaatcgtctttcaggacgtggtcttattccgggataccattatggaaaatatccgtctggggcgccgggacgccacggacgaggaagttctggcggcagcccatgccgcacaatgcgattcgtttgtccaaaaactaccggagggctatgatacgttgatcggcgaaaacggcgcgacgctttcgggtggggagcgtcagcgcatctcgatcgcccgggcgctgctcaaggatgcgccggtgatcctgctggacgaggccacggcctcgctggatgtagaaaacgaaacggcagtacaggcagcgctttcaggcctgatacgggataagactgtattgatcatcgcccaccgcatgcgcaccgttatgggggcggacaaggtcgtggtgatttccagtggaaaggtggccgagatcggcagtccaagccggctgttggaaagggacgggccctttaagcatatggtggcattacaaacagaaagccagagctggagcttgccaggtgatgaaaagtgatgatggaccaggcggcgctgtgcggcggacatgcggcttgcccccctggagccgcccccttttataccccttttgggtgagaacgcaggcgtttctgcttgtagtgatgttggagaagtgctataatcaatattagttagttgatactaaccgataatatggaaagatatgtcgcatactagtgtgataaagaacgtggataagaaaggatgagcatattgaaaaagggtttaatgattgaaagtgtgaagggccgagagatactcgattcccgtggcaaccccacggtagaggcgcaggtgtgcctggcggatggcaccattgcccggggcgctgcgcccagcggcgcatccaccggggaatttgaggctttggagctgcgggacggcgaccccgggcgctacggcggcaagggggtactaaaggcggtaaagaacattgataacgtgatcggccaggcgctccggggaatggacgcttcagacatctatgcggtggatcaggcgatgataaaggcggatggtacaaaggataaatccaaccttggggccaacgcgattttagcggtttccattgcctgcgcccgggctgcggccaacgcgcaggggctgccgctataccggtttttaggcggcatcaacggcaaccggctgccggtgcctatgatgaacattctcaacggtggggcgcacgcagccaataccgtggacgtgcaggagtttatgatcatgccagtaggtgcggccagctttgccgaagggctgcgctggtgcgcggaggtttttcacgcgctggcggcgctgctcaaggctcagggcctggcgacctctgtaggcgacgagggcggttttgcgccggacctggcgggcgacgaggaggccatcacctatattttgcaggcggtagaaaaggccggctaccggccgggaacggactttgtgctggcgatcgacgcggcatccagcgagtggaagggcggcaggccgggtgaatattgcctgccgaaaagcggcgtgcggtatacttcggctgagctcgttgcacactggaaagccctttgcgaaaagttccccatctattcgatagaagatgggctagacgaggaggactgggcgggctggcagctgatgacccgggaactggggagcaaagtacagctggtaggcgacgatctgtttgtgaccaataccgagcgcctggccaaaggtatccagcaagggtgcggcaatgcgattttgatcaagctcaaccagattggctcagtatccgagacgctggaggccatcaagatggcgcacaaagccggatatacggcgatatcctcgcaccgctcgggggagacggaggacacgaccattgccgacctggcggttgcgctgaatacctgccagatcaaaaccggcgcgcccagccgtagcgagcgggtagccaagtataaccgcttgctgcgcatcgaagaagaactgggagagagcgctgtctatccgggttttgaggcgtttgcgatctcccgatgatgattgggatggagcgatgttcgggcgctaaagatgagcttagcggtttgtgataatgggtgggcaggtcagaaccttcggcgggcacttcatgtgcgcccgccgaagggcggcctgtgcgggctttaggcaggttaaacggcctttattttgatgataatgaaaggatgctattgacctgcaacaaagaatattgtataatatcaatagttagcataaactaaccaaaatgcttttgctgtttgcaagaaggcttttttattatctaaaggttagttataactaactatttggaccgacgaaccagacacatcacaataggagagaagagcgccgtttgctaaacggcctaaaggcgggaagggaggcggagaaatgaaagtgcttgagtccggagaggactatctggaaacgatcctgatgctgcagcagcgcggcggaaccgtacggtctgtggatgtagccgcgaagatgaaggtatctaaggccagcgtcagcgtagcgatgaagaatctgcgcgccgggggatacgttaagatggggaataaccatgagatcgtgttaacgcctcagggacgccagctggcagaaacgatgtatgaacgccaccagttgttttccaacattcttgcaggattaggcgtggacggcgaggtcgccctgcgggatgcctgccggatcgagcacgccctcagcgccgagagctttaaagcgctgaaaggttattttctaaaaaacggggtagacccgccggaaaaggaaaaatggactggcgatgcacaaaagacttaaagcagcggtgcgctgcccgggtgaggaggaagcctgttgttagagaagtacctgatcgagcactgcgccccgacgctggcatcgatcaagacggccagtttgttctgcctgccgctcatagccgagcgggagttggaacaccagatccagctctggaacggctgctttgcggaaaagggattgtttttgactgtcctgagccggaaaggcgggcgggcgctggtctatgtatgccgccgcgcccatctggagcgagacctgcaaaagcggggggtggccagctttttggctcaatatggctatccgtgcgtggaactggatgccgcgctggccaggctgaaacaacggctgggcgagcaggacggcttcccccatgagatcggcatctttttgggctatccgctgggcgacgttatcggatttattcaaaacgagggccggaattgcaagtgcgctggctgctggaaggtctactgcgatgcgcacgaggccggcaagatatttgcccgctaccggaagtgccgcgagatctatgcgcggctttggcgcgggggcaagtccatcgtgcagctgacggtagctgcctaaaccatagaaattcaagagaaaagaggtaaagttgatgagtaaagtagcggttgtatattggagcggcaccggcaataccgaggccatggccaatctggtggccacgggcgcgaaggaagaaggcgcgcaggtttctctgatggtcgcgtccgagtttagcgcagagcagatggacgattatgacgccatcgcctttggttgcccatccatgggtgccgagcagctggaagaaacggagtttgagccgatgtttacggcctgcgaggcaaagctgcaggggaaaaagatcgcgctgtttggctcttacggctggggagatggcgaatggatgcgcacgtgggaggagacctgccggacggacggcgcgcttttggcctgtgattgtgtaatctgcaacgaagcgccggacgaagaggcgcagctggcctgcgtggcgctggggaaagcactggtataaaaaactgcggatttgctgcggacatagcatgcgtctgtgccccaaatggtgtggatcagcgccccagggaaatggacgctgatctactgctttttatccaatatggcttccctctgagcattgacaggacgcgaatgcgatgttatagtaaaaccgatagttagcaattactaactacagatgacggcgtaggagcggaagcatgatgccattgatgatggccccgatgggacaggagcagacgattaaaaaagtgggcggatcagcacaggtcaaatcccatttagaggatatgggctttgtcgtgggcgggaggatcacagtgatttcggccattggcgggaacctgatcgttaatgtaaaggatacccgcatcgccatcaaccgcgaaatggcccggcggatcctggtatagggagggaaaagccgatggatggcatgggatctacgattttaatttgtgccgtattggcggtgatttgtgttttttccgtgcgcagttatataaaaaagctgaaaaatggctgttgcggcgcgggaggagatggggtcaggcgtattcgtccggcagaccgggagattgcgcactacccttatacataccggctgaagatcgaagggatgagctgtaaaaattgtgcgatacggatcgagaacgcctttaatgagcaggagggcttttatgccaaagtcgatcttggaaagaagagcgcgctgatccgcttgaaagtacccgcggcggaggagatgctggagcagaccgtcagccgcgccggttatcaggtaacggaattagagcagcttacgccctaaagcagatgcagcaaatgaagaacaacaaaaaaagcaacccgaattcgggttgctttttgaatgccgtttttattaaaacggagcgttttacagctcgaaagcctccaccacggcggtgacggcgcgggtcagatccgcctggtcgatcacacaggagatcttagtctcgctggtggtgatgccgcggatgggaatatctccgtcgctaagcacctggaagatgttggcggctacgccgctgcggtgggccataccggcgccctccacggtgagaatggcgatatccgtggccacatgcacgtcgcccggcttaccggaggaatcctccagagtggcgatggcattaagcgccgcgtccatggattcgcgcggacaggtaaagcttaaatcaaaggcgccatccaccggcgcgctctggctgatcaggtccacgttaacgtgggcgtcggccactgcgcggaaaagctgggcaatcagtttgggctgatgggggagtttgcataccgtgatcatcgcgctttgctcatcggtataaagggaagtcatggtctcctgcgccatcaggtcctccatgctgtaaaagccgttgggctgcccgcacaaaaactgggcggcgcgcagggcgcctttggcaaagatacgcttggacagggcggagtgctcgatcttgaccacttcatccgtgccgtaaaagcccacgctgtgctcgcccaccaccgtgccgccgcggatggcgtggatgccgatctcgccgcgggtgcgccggccgctttctttattgcggcccaggcggtaggtcttgggctgaggataggtggcgttgagcgcgtccgccagggccagcgcggtgccgctgggcgcgtccacctttttgttgtgatgggcctccacgatctcacagtcaaaatcgtccccgaaaaaggccgcggccttttggatgaggttcatcatcaggttaatgcccagggacatattggccgcctgaaagatggggcaatccttttgcgcggcatggatcatgcccttatcggcatcggtatagcccgtcgtggccagcaccaggccgatgttgtgcatcttgccgtaggtcaaaagcccctgcaaggcctcgggccttgaaaagtcgatcaccacatcggcctccacgtcgcagtcaaaaagcgagtggaataccggaaaggggaaatccttgggatcggccagcttatctatgccggccacaatctctatatcgctgccatcggctgcggcctgggccaatacgcggcccatggcgccattgcaaccgtggatgatgattcgcgtcatatcttcagcacatccttaagattttcagtcgatcaggccgaaagcctgcatttctcttttgaggcgcgcaaggttggcgtcgctcatctcggtcagcggcaggcgcaacgggcccgcgtcgatgccgatcagccgcagcgccgtcttggccgggatgggattgacctcgcagaacagggcggccgccaaaggattgaccttaaattgcaactctcgcgctccggcaatatcgccggagaggaatttttccaccatatcgtgcatgatccgcggggcgatattgctcaccaccgagatcacacccttgccgcccaccgagagcagcggcaccaccaatccatcctcaccggagtacaggtcgcacttgtccccacacagccttgccatctcgctgacctgggccaggttgccgctggcctccttcatcccggcgatgttgggatgctccgccagggctgccagggtctcgggcagcatgttcagccccgtgcggccgggtacgttatatacgataatggggatatctactgcatccgccacggcggtataatgggcgatcagccccttttgcgtggccttgttgtagtagggggtgacgatcagcagcgcatcggcgcccatcttctgggcctcgatgctggcggcgatcacttttttggtatcgttgccgccggtgccggcgatcacggggatgcgtccggctgtgcgctccagggcaaaggagagcgccgcgcgcttttcctcctcgctcatggtggaaggctcgcccgtggtgccgttgacgatcaaggcgtccgtaccgccatcgatctggaaatcgatcagcttgccaaaggcgtcaaaattaacgccgtcctgggtgaaaggggtacaaagcgcgacgcccgcgccggtaaagatagacataaacgctcctcctttagcctttcaaaggccaaaccgctttactgtattacttatgcgggatatagcctttcgcgcacaaaagttccgcgatcaataccgcgccgcccgcggccccccgcagcgtgttgtgggacaggcatacgaacttatagtcgaaaatattatcctcgcgcagccggccgatggagatccccatgccgttttccaggtcccgatccaaatgggcctgcggacggttatcctcctcaaaataggtcaaaaactgacgtggcgcgctgggcagctccaactcctggggcaggcccttaaaggccgcccagcgggagagaatctcctctttagaaggctttttgtcaaagctgaccgaaacggcggcggtgtgtccatccgccacggccacgcgcaggcactgggcgctgacgatgggagaggcggccttgacgatggcgccgttttcgatatggccccagatcttgagcggctcctgctcgctcttttcctcttcgcccccgatgtaggggatcacgttgtccaccatctcgggccaggacttaaaggtcttgcccgcgccggagatagcctggtaggtgcaggccaccactttgctgggcccaaaatccatcagcggggccagggcgggcacgtagctctggatcgagcagttgggcttgacggcgataaagccggccttggtgcccaggcgcttgcgctgtgcctcgatgatggcgcagtggtccgcgttgatctcagggatcatcatcggcacgtccggcgtccagcggttggccgagttattggagatcaccggcgtttcggtcttggcataggcctcttccaacgccaagatctcatcctttttcatatccaccgcgcaaaagacaaagtccagcccctgggcgacttcttctaccttggaggcatcctgcacaatgagatttgccgcctgctcggggatgggccagtcaaaagcccaacgcccggccacggcttcgctgtaaggtttgccggccgagcgggcgctggcggccagtttggtcaacttaaaccaggggtgtttatctaaaagggtaataaagcgctggcccaccatgccggtggcgccaatgacgccgacgcgatactgctgcataatcgactctcctttttatgtttccatttttggggcccatatctatagtgtagcgcaaatggcccatggggtgaccctaagattttgtaaattttgcgggatataaaaaaacagcggctcttatggcgcgctgtaaactacatggaacacccgccccctgaaacgaacgcaatgcgcgcgcatttagcggaggagtttccaaacagttaagcgcttcgcctggaactttcgcctggcgacagtcggatggcttttcgcccgtccgcccaggaaagccggcccgaatttccgcccttccttcggcatactgcccctttggccggcattttagcggggaatacggccccttacaccggttaatgatggcagatgcgcctcgaaactgtctttatacccgattaaaagtacaaagtctatggcgttaggataccatggggccttgtgcggtgtcaatgcctttagcgtgaaaagcgccccacggccagcgaaagctctttggcggcgcttgcgcgggcggctaaattcgcttatgatgataaagataaagttatgcaaggcttcattatatagggatatagaggagattggctatatgcaatccgtagagagagaacgctatacccagctgtgggaggagaatttacggtatattacccaggttcgaagatcgctgcacgcccagccggaactgggtacgaaagaggaaaagacccacgattttctggcccgggagctggagcacctgggcgtggacgagctgcatacctactatggcacggggctgcgtgcggtgattagggccaaggcgccggcgcgcacgctggcctttcgggcggatatggatgcgttacccctttctgagcagaccgggcgtgatttcgcctcccagacgcctggcgtgatgcatgcctgcgggcacgacggccatatggctgcgctgctgggattggcgcagttgatccaggccctggggcggccccaagatgccaatgtggttttgctctttcaacccgatgaggagggagagggaggcgccgcgcgcatgatcgcccagggcgcgctgaaagatccggatgtggatgaggtctacggctttcacctgatgcccgatctgcaagaagggctggtggcggtttcccaagggccgatgatggcgctgaccaacgagtttgacattcagatcaccggcgcctcggcccatggggccaccccccacatgggcagcgatgcgctgacggctgcggcttatctgatcacccaaatgcagaccatcgtcagccgccgggtggacccggggcagatggccgcgctgaccatcggacgcatggaagcgggccaggtgcgcaacgccctggcggcgcaggcgcatctggagggcattatgcgcgcctatgatgagcgcacacacgacaagatgcgcgccaccatccgggagatgctcgccgggctggaaaagagctttgacgttaagacggcctatatccagaaatgctattatccaccggtgatcaatcctgctcccagtgcccgcaagatcagggaggcggcggggaaacgcgcggtggaggccacgcctaagctgacggcagaggatttttccttttatcaacaggctgtgcccggcgcgtacttctttttaggcacccgcagcggggaaaaagggttcctcgcaccgctgcacgcaccgcgctttgattttgacgaagccgtattgcaggtcgcccaggcggtatacctgcgcctgctgggctatacgcaagcagctacttgtttgttagagccttaaatgttaaaatatagggatggaaaaaaggggcggcggattggccccttgttcaaggcgaataaaggagaaaaagatgtttaaaaaattgatcggtagattctataacggcaatcccaataaagcggattttaccgaaaaagatctacccaaaaacaggatcatgctgttttttcacgtgctaggcacgcggctttttaaactggtacagctgaacatgatctattttatcgcgatcatccccacgctgatctggacggtgtggacctttatggcggtaatggaggcggctgcgccggcagagggcgtcgttccgccggacatcggtttggtgctgcgggattattttttgattttgatcccctgtatggcgctagccgggccgggcacagcgggggcaacctacgtgctgcgccgctgggcgcaggatgagcacgcctttgtttggggcgatttctgggccgcgcttaaagcaaactttacccagtccatggtgctgaaccttttaaacgggttggcgttttttgtattgtatttttgctactggtattatgggaccatggccatcgacaacatctacatgcgcctgccgcagtactttatcatgttcctggcgatcttcgtggtgatgatgaaccagtacatgatgccgctgctggtcacctatgatttaagcatccgcaagatcattaccaatgcggcgcggctgaccatattgcgcctgccccagtcggtggggattttgctgtgtacgctgatcccgttttgcactatctttttgggcacgctgttcttatcgctgttttattcattctttggctttatgctcacagggctgctttgggtctccggggcggtggcggcctttgataaatttatcaaccccaatatcgaaggggtggagatcaaccgcgggctgcatcccgattataaagggtaaaaagcggccggcgcggccggcttacccaagtgcttttcgtataattatgggcttgaaacaggatactaaggcctatcagcaagcgaaaagagggtaagaaagatggacgtgattttaaaggcgaataaacaacccgttggccctgaggatgcgatcaagtaccgcgcagccgaggagctgaacctactggacagagtgctggaggtaggctgggctggactgaccacccaggaaagcgggcgcgtaggcgggctgatcagccggtggcgccgaatgggcggcgggccggagggatggatcggctgacgcgggcgcggccctgcaaggacaagggggcgtagatgattaaaccgatacccgatgcctggcgcgcgctgcctcgcatggcggcgcaggcgagctatacttttttgccggaggtctacgatctgtttagcgaggacatggacccgatcgcctgggcggacgacctgatctcgcgcctgcgggaagcgggaatatcccgcggacgggtgctggacctggggtgcggcacgggccgcatctccctgcaactggccagggccggatatgacgtagtggggatcgaccgatctgaagagatgctgcgcgtggcacaggaacggctgtggagggaagggcacaggcttcccctgagccggcaggacatgcgcagcttttcgctgcataaaagcgtggatgcggtgatctgcgcctgcgacggggtcaattacctgaccgacctggcgatggtggaaagctgctttgcccgggtggcgcgggcgctgaggccgggcgggctgttcttgtttgatatctccagccgctataagctggaaaaacggctgggcaacgactttttcggcgaagtgcgcgaggaggccgcttatctgtggcagagcagctttgataaagcacgccgcctggcccgcatggatttgacgttgtttatccggggacaggacggccgctatgaccggggagatgaggtgcatctccagcgcgcgcacgaggtggaagagctgcgcgcctgcctggcgggctgcggcctggggcttttggcagtgcaggaggcttttacgcgcaaagcgccccggcccgatgcgcttcgcattcaatttaccgcggtgcggcaataaccaggggcgcccctgcataagataagatttgaatgaatggagttttataccttgatgcaacatgatgagattcttcgcgcgatgctggcggacggcgaggccagcctgatgctcagccgcaccacctgcctggtagagcaggcgcgccagattcacgattgttcgccggtctgcgcggctgcgctgggcaggcttttgaccataacagcgatgatggggtgcgccctcaagggcgaaaacgatacgctgactgccacccttaagggtgacggccctgccggcacgctggtagcggtgggccgccccggcgggcgggtcaaaggctatatcgaccggccacaggtggatttgccgctgcgcgcggatggaaagctggatgtggggagcgcggtaggccatcaaggccggctgaccgtgatgaaggatctgggaatgcgtgaaccctacgtggggcaggtgcgcctgcaatccggcgagatcgcggatgactttgccttttactttaccgtatccgagcagcagccctgtctggtcagtttgggcgtgctggtggacagcaccgcggtacaggccgcggggggaatacaggtatcccctatgccgggctgcagtgaagaaacgctgcaaaagctggagcaaaaagcaggagagctgtcccatatcagtacgttgattgccgatggagagccgctgcccgagatcgcccaggcgctatttggcgatatggagctgcgtattttagagcaggtagttccagcctacgagtgcgattgcagccgcgcgcgcatcgagcgagcgctgctcagcatcggcagagaggagctgcaggagattttgcaacaggacggccaggctgagctgacctgccatttttgcaataagcgttatcattttgaccgggcgcagcttgccgccctgctggccgaagccggcgcaagcaatacgtaaaaggggtgcgcatggagcagttgaagcagaagccaaaaatcgtggccttcgaccagtcggcaggctttttttccaggcaggcgcaaaagtttgccgagcagaaccgctttgccgatgccctgcgctatagccgcatggctatggaaaaggagccggataacgcccaataccgcatggagctggcccagttgtataccgagatgtgctattatgaggcctccaatgagattcttctttatatggtgcagcgctatggcgcccagatgccggagtgctttttctcggtaggatgcaactttatgggcatggctgagtatgaccgggcgcgcgagagcctgatccattacctccaggtagacccttatggggaatacatggaggatgcccaggagatgcttgaggcgatagatgaataccagcgcatgatctacgatgaggacggccaggaggaagacccggagcgccgcgccctgttctacaaggcggataaggcgcgcagcctgatggaaaacggcgatttccgcggggcgatcaagctgtttgaagaggtgctcaaacaggattccagcctgatctttgtgaaaaacaacctggcctttgcgctgcaaagccagcatgaaggtgagcgggcgatgcagctgtgccgtgaggtacttgaacaggacccggaaaacctgcacgcgctttgcaacctggccctgtttatgcgggatgcggacagccaggcggaccttacggcgtatacgcggcgcattgccaccatgccgctggaggaaaacgacgatatccttaaagcggggatgacgctgtgcgagctgggttgtcacagggaggcgcaggggcggctaaaggagatgctggagcgccggccctatgagatgcgcgtgctgcacgccctggccatgacttattataaccttggcgactataagacggctgtgcggctgtggggggatatgctgcgtctggatgcgggggataccatcgcggcctactaccggggcaaggcccagcaggcgcttgagagcggccagcctgagcgcaagacctatccttatccctatcaggtgccctatgatgagatccttacccgtatccgcacgctgggcgagtggatctgggcgcccaagagcagccgggccaaggagcggtggaaggaagacccggagtttgtgaacctggtgctgtgggggctaaatctgggggatatgaccatccgccgggcgcttttggggatgctgggcagtttcggggatgagcgggcccagggcatcctgcgtggattcttactgcgaaagagcgagccggatagtgtaaagcgcgagatcttcggcctgctgcgccaggctggcgccaaagagccttatattgcctacatggacggggagatcgttgaggtgcacgtcaacctgctgccgccggaaactgcggagctgacgcgctctgagcgcgtggtgctggaaaaggccatggaggtagcccagcgcgagggctggggcgaggtattagagcctatggccatactctggtgccgggcggtgcgcaatttgaattggaccaaccgcgaggggctgcatgcccagcagtgggcggcggcactggcctttgaggcatcccggcaggcggggatggagccggtacgcacgcgcgttgccaaggtgtaccacaccacccccgggacgcttaaaaaatatcacgagcgcctggtgcaggcgttgcaaacaaaagaggaaggagcgggcgagcatgaaggaactgattaattttgacgaacagtttggccaatatatagaaaaatggatggcggaaaacgcggataaatacgagaatgtagacgagatggaggcggaggtccccgagctttacctgaagtggatgcacgaggacgccgcgtttttggacggggcggagccggcccattactttgaccggtacgacgacccggaggagctgctggcgctgatgcgccggtacctggacgagaatgtgcccctgcctgatccgttgctggagcggctgaccgacctgggcgccgcggcggagcgggcgctggtggccgctttggagcaggagcaaaaccccgaggcgcagatgctggagatcggcctgctgggcgagctggaaagcgaagcccccatggcgttatacgtggaatgggcggccaccggcgaggagggcgacgaccgggccgaggctgccgcggaagcgctgggccgtatgagcgagcgggtggtcgccctggcactgcccaggctgatgcaggccaaagccccacatatcaaggcgcggctgatcgacgttttgtgcaacttccccggagacgacaggatctttgagcagcttttggagttgttttgccagcggcgggaggagcgcgcgcttttcgcctcctacctgtgcaaatatggagatgagcgcgccctttccgccctgaaagaggcgttggtagacccggatatcaattatctggactatatcgaaatttgcaacgccatcgaggcgctgggcggccaggtggaggtgcagcgggactttaccggcgacccttattatgaatctttaaggacgatgaacgattaaagggcaaaacgttcccttgaaacggagggagatatggaaaataagatcattacgatagatgacgtgcgcaacgatccgcagatcagtgcgctggtgcactatgccaaccacatcatgtccgtcatgggctataccgagcacggcccgcggcatgtgggggtggtcagccgggtgacgacggatatcctgcgggagctggattaccccaagcgcacgctggaactggcggagatcgccgggtgggtgcacgatgtgggcaatatcgtcaaccgaacggatcacggactcaacggcgcggtgatgctgctgccgatcttgcagcagatgggcatgcccattgaggaggtgctgcgcatcgtatcggccgtgggcaaccatgaagagcagcacggcaccccggtcagcgagatcagcgcggcgctgatcatcgccgacaagagcgacgcgcaccgctcccgcgtgcggcgcggccgctataacccggaggatatccacgaccgggtgaatatgtccatcaagaaaaactgggtggaggtggacaagaccaaccgggtgatccgctttgagctgatcatggacgggaccagttccgtactggagtttttgcagatctacatgtcccgcatggtgatgagcgaggacgcggcccactttttgggctgccggctggagatcgtgatcaacggcatgatcatcaacaaccacattaaaaacctggaggccgcaaaggcgaatctggagaaaaggaacaataatttagataaatgagaaaattccatttgatcgccacggcggcctttgggctggagggcgtggtagcggcggaattgcgccgcatgggttatgaggtagaaacagaaaacggacgcgtgcgcttttgcggcacgatggcggatatcgcccggtgcaacctgtggctgcgggtggcggaccggctgctgatcgaggtgggcagttttaaagcaaccagctttgaagagctgtttgaaggggtcagggctctgccttgggaggaatatattcccaaagaaggctgctttccggtgagcggcaaggccgtagcctcgcagcttatgagcgtgccagattgccaggcgatcaccaaaaaggcgatcgtggagcggctcaagcaaaaatatcctgtcgcctggtttgaagaggccggggagacctataagcttgaggtgggtctgctaaaagatgtagcgactttgacgctggactgctcgggcgcggggctgcaccggcggggctaccggccgctgacggctcaggcgcctttgcgcgaaacgttggccgcggcgttggtgttgctgtgccgctggcatccggaccggacgctgtgggaccccatgtgcggctcgggcaccatccccattgaggccgcgctgatcggccgcaatatcgccccggggttgaaccgcacttttgccgcggaggactggcgctggatggataaagatgtattccgtcaggcccgggctcaagcgctggaggcgattgaccgggagcgggagctgcatattatgggtacggatatcgacgagcgggtattgagcacagcgcgctttcacgccaagagcgctaaggtggaaaaggacatccatatccagtgccagccactgagtgaaatgcgtacctcccgggaatacgggtttatcgtatgcaacccgccttacggcgagcggatgggccagatacgggaagcggagcagctttaccgggagatggccaaggtgtttgccaccttgcccacctggggtaagaacgtaatcacctcttatcccaactttgagcgggtatatggccgcagagcggaccggcgccgcaagctgtataacggcaagctgcaatgccagtattaccagtacttagggccgcgcccaccctggctggaccaggccaggcaagcggccgcacaatcggacgattaaatttttaagacggctcccctggataagggggggccgcttgttttataccaagcgcccctccaataagacccatagacgcgggttttgacaaattacatacaaaggaagatgtgcagcgcggctttttatggtaaactgaaagagacaatacacggatatacggtgcttaggcggccgatcttgggatgaaggggtatcgatatgaagaaaaaaatactcagattgtgtgcagcggttattttactggccgccctgtttgccacgccgggcctggcggcggcggacacccgtacctatgagttggaggatctggagttaagcatcgagatccccaacagttatggcgtaacggcgcagggcgtggtgggcaaccgggccgtatttgccttgctgggcgtggacccggaggaattttgggcggattacgaggggaccgacatctacctaagcgccgtagggatagacccgctgcgcgaggtcaacatcgcgacctttgaggtggaagacgtatttaccattgacgtggataccctgaaaaacgcgccttcctacctgattgaccagcagatagattattttttggaggacagcgaggtcaccgattgccggacgtatgagaccgatcaggcgctgtacattgtagcggatcttgagcagcggcaaagcggcggctatgtgcatatgtattttacagtgatcggcggccagggctacaacatcggcctgtatacctacgggcagcaggcaggttttgcccaggagcaggagctggaggcgatggtggatagcatcgactatcataacctgccgctgggcggatttggatatgattcttcttatgataccgcctatcgggcgggggagaccatcggtaggatcacggcgatcaccgcgataccgggctttttgttgtccattgccgcgctggtgatcacgctttgcatggccaataagcgtaaaaagcagcgggaagaccagcgcgcacaggagatggccgcgcttgggcagcaagaggcggaacagcccgtcgttacctgggaagcgccccagcaggctccggaggagccggttgaggaagccgccgcccagccggagaaagacgaagtggatgcggggcaggaaagcggcggggtcatactctcgtcagagggcagccagccagcgcccgaagcggaaccgtgcccggcggtaaatccgcgcttttgcacggagtgtggtaaacccctgccggagaacgcggctttctgcccggaatgcggcaagaaggtgcaaaaataatatcccgataaaggggagagcgaacgtgtgcggagaagaaaaggtaagtattcgccgcgccgggcaggatgatggcgcccatcttgcggccttagccaaggcactgtggccgcagcaggatcaagaggtgctacggcaggagatggcgggactgtgcacccagcggggggccgcgctgtttctggcggaatgcggcgcccaggcagtaggctttgcccagtgccagctgcggcgcgactatgtagaagggacgcattccagccccgtgggctatctggaagggatctacgtatgccccgctttgcgcggcaggcatgtggggctgcaactgctcaaggcctgtgaaaactgggccagaaccatgggatgcttggaatttgccagcgattgtaccatcgagaacaccggcagccaggccttccatcagaaagcggattttacccaggcggcgcgcatcgtatgttttaccaaaaggctgtagtgataagggggaatgaagatggagaatttctgcgttttaggctttgggcatgtgggcatcagcgtgcgggacattgcccgctcgcggcggttttatgaggagatgctgggctttaaagtggtgtgggaatatcactttccggaccgggaactgctgtttatgggcaacggttctgtggtggtggaatttttgcagacggacagcgcgcttgcagatgggccgcttaaccacctctctatactggtagacgatgtggaaaaggcgaaggcggagctggagagcaagggtgttgtgtttgaaactgagttgctgctggatgaagacctttacccgcgaggagaaaaatttgcgatcttccgcgggccggataacgagcggttacagttagaacaaatactttgagataaagatagcaaaaggaggagcgagatgcgacttgaaaaggtaacgcttaaagggaacgagcatgtaacggtgacggcttatctgctggaccatcccacccagttccccaatgtgacgcggcggccggcggttctggtcttcccgggcgtgatgaccaatggcggaaaggtgctgacctcccagcgggaggcggagtgcatcgccatggcttatctggctgaggggtatcaggcctttttgctgaattactccatgcccgcatggccggtattccccggaccgatcgacgatgtgcaggaagtgatggatatcctgtacgaaaagagcgcggattgggagatcgacaccaaccggatcgccgcggtggccttctccgagggcgcgtatgtggccgtagcgcaggcgatgacggcgcagcggcaccgcccaaatgcgctgattttgggctatccccagatcccggaacccgaggaggtgcgcccctataacgccccggtcctgcaggagatcgccgatgaaaagacgccgccggtctttttattctctacgcatgaggataccggccgcccggctaaaagctgcctgagcctgctgttggcgttggataaggtgggcgtgccctacgagatccacctgttccaaaagggcgcacatggcctttccttgggcaaatcgctgtgttcttccggcatgggcttttacgtagacgccaactgggccaagtggtttgaactgagcgtgcactggcttaccgccaactggggcgaacccttcccctatgagggcgagttcttaaacgctgcggatatcggcggctataatatcgatacgtatatccgcgacctagcccaaaacccggcgtgtatggcggtggtcaccgaattttggccggagtatggggatgtgcagtttgtggcggaacggctggattctacgctccgtttctcaaacgtatggttcccccagcccttaaagccggacgagttggaaagcatcaaccagcggctcaaagcgattccgctggcataaaacgataaaaagccgtgcttttgcgcggctttttttattttcggctatttgacaaatgaattgtgataaagatatactagatataaatagatatgatgattttgcgatattacaaaataaatagacataaataaacgaaaatataaataaatggaactcacccagacggtggcctggatttatagacaaaggagtgaagagcagatggaaaagttgcagctggggtggatcttgtttccccggtatgatgaggactattggagcagcctggaggcgtataaaaagatcggctactcagggttggagagcggcgaacagctgctgacgctgaaagagggcacgccggaggagaacctggcacgattcagggagatcggccttaaagtcatcgcggtgggcgccaatgaggtggcgcagtatgatgaaaagctgatcgacgagaagatcgcccaggtcaagctgctgggggcggactttgcctgctgctatatttccagcatcatccgcccgatgatgggggaagccccctgcacggatgatgaatttttgcaggagatcgaaaacctggagcgctcggccgagcgttttgccgctgccggcgttaagctggcctaccataaccacaactatgagtttatccgcaagatccatggcatcagcgcctatgatcagatggtctcgcgcacgtccacgctgtgctttgagccggatgtgggatgggtgacctatgccggagaggatccgatagcgctgctggagcggctggaagggcggctggtggcagtacattttaaagattttatcccgggccggatgcgcacagccaccttggcccccggagtaagttataccatccccgattttactgccgtgggctcaggcgtggtaaatacctttggcgtagcccagtgggcggcggagcatgggctcacatggggcgtcgtagaacaggacggtaaccgcaacctttgtagtgtggatacgctacactgcgcctacctgaatctgaaagaatcgggctttgccggctaataagaaaagccgccccataggggtggcttttcttgattaatagagctttgacttactgttcctccagcttatcgggctcgggcagctccggcccctcgatggtgacggtcttgatcaccggcgcgtcgcccttgccatcggtttcggcgattttgtccaccacgtccatgccgctgatcaccttgccaaaggcggcatacttgccgtcgagataggtgctgtccttatgcacgatgaaaaactgcgaaccagcggaatccatactgacgttgttgcgggcaaaggagatcacgccccgcacatgggaaatatcgttttgcacaccgttttccttgaactcgcccttgatgcaatatcctgggccgccggtgccgttccctaaaggatcgccgccctggatcataaaatccttaataatgcggtggaaggtcagcccatcgtaaaaatcttcccgggcgaggtagacaaagttgcgtacggactggggcgccttgtcgggatacagctctaaaacgatgtttccgccatcctccatctggatggtggccgttacgcccgaggtggcttgtaccggttcttcgctggcgcagcccggcgcgaacagggccaggcagatcagcagtgcgattagctttttcatgcgattgatcgtctcccttatacgtagatcatggcgataaagccatacagcaattaggataccctgcgcagcccggcttgtcaaaccccaggctgcgcggccccatgctggtatgaaacgccgtgcagatgcacatgatagtacaaaacatttgaaaaagaggtgcaacagatgttcaatgaaaagattcgtgtcgttcagtatggctgcgggaaaatggccaagtataccctgcgctacctgtacgaaaaaggtgcggagatcgtgggcgctatcgacgtggacccggcagtagtaggcatggatgtgggcgagtatgcgggcctgggcttcaagctgggcgtgcccatccgctcggacgcagatgcagtgctggacgagtgcgacgccgatattgcgatactgacgctattcagctttatggatgacgtatatccgcattttgaaaagtgcgcgcggcgggggatcaacgtggtcaccacctgtgaagaggcgatctacccctggacgacggcagcatcggataccaaccggctggacaaactggccaaggagaccggctgcaccatcgtgggcagcgggatgcaggacatcttctgggtcaacctcatcgctacggtggcgggcggatgccataagatcgataaaatcgaaggcgcggtcagctacaacgtagaggactacggcctggcgctggccaaagcccacggcgcgggttttacccccgagcagtttgaggcccagctggcccacccggagacgttggagccggcttacgtgtggaactccaacgaggcgctttgcgccaagatgggatggaccatcaaatctcaaacgcaaaagtgcgtgccctatttctacgataaagacctgtactcggagacgctgggtgagaccatacccaaagggaattgcattgggatgagcgccgtggtcaccaccgagacctaccagggccccgtgatcgagacccagtgcatcggcaaggtttatggcccggatgatggggatatgtgcgactggaagatcaccggcgagccggataccactttttacgtgcaaaagccggccacagtggagcacacctgcgctactatcgtcaaccgcattcccagcgtgctgacggccccgtcggggtatgtgaccatggataagctgcccgaggcggagtatatgacctatcccatggcggtgtatgtggatttgatgtgctgatggacgttttaacggccgggatgccgcaaggcggcgctgcccatagggcagcgccgtttttctataaccgcattatctatttgtttttgcacaactaaatatatttagaattgacagtctgttaagacggagagaaaatagaaaaggagccctagacgattagaggagggccgaacggggctttttataggttgcttgaaatgaacgactgttaagggggtaaagaaaaatgatcgattacaaaaaggtggacggcagcttttctctggcgggcaaaacctgcctggtgaccggcgcggccaatggcatcggcaaggcttcggccacgctgtacgcttccaagggggctaatgtggcactggtggacctgcaggaaagcgttcacgatgtagcgcaggcgctggccaaggagtacggggtcaagaccatctcgattatcggggacattaccaataaagagagcattgccaatatgatcgataagactaaagcggcctttggtgggatcgacgtgctggccaacatcgccggcgcggtagaattggaggatgcggaaaaactgcccgaggcgtactgggataagatgatgaccgtcaacgccaaggggactttcttgatgtgccagctggtgggctgcgagatgatcgcccagggccgcggcggcaagatcgtcaacatcgcctctcaggcgggctttatcgcgctggacaagcacgtggcttatactgcttctaaggctgcgatcatcggcatgaccaaggtgctgggctttgaatgggccgagtttggcatcaacgtcaatgccgtttcgcccacggtggtgctcacggagatgggcgagaaggcctggcagggcgaggtggccgagaacatgaaaaagcgcatccccgccaaccgttttgcatatccggacgagatcgccgcggcggtcctgttcctctcgtgcaacgagtccaacatgatcaccggcgagaacctggtggtggacggcggatttaccattaaataattaaatttctgtaaatcatgtggccgggtggccaagatatgatagaataggaaaaaggctttttataaagcctttttcttttgctataaatgccggctgcggcggggcttttgcaatctcaaagcggctatggtatgatatttacgatgaattgacgcctgcctgcgggcgaaagcgaggaaataattttggagtatttgctgcggtttttaactttttggctgaaactgctcgcgatattgctggccctggcgctggtgggggcctttgtatttctgttttccatggactcgaccaatattaacaccatcttatccgaggggatgaagacccgggccgaatcggtcatcatcggtggggaacaggaagagatcaccgataccctgtccaaattctttacctgggattttctctccagcgacgagatgatccaaaatacggattacaaccgctttgtggtccgctcgatccagcaccggctcaaggtagaatgggtgtgtgccatgccatgggatacagtaaccgaggccacggtagtggaagaggtgccggcgatcgacggggagctgcccaaaaacaactatacggaagaggaagaggcctccggggaaaaggtactgccgccggcctggccgcacgcacgctacaaagtgcgtttggtgcgcagcgaggagcgctggaagatcgataaggtggagctgatcgaaaccatcgaggatgccgtggctacccccttacccagccagacgcccgaggcgcagcagaccccggcggcagaataatggcccaaaggcgcgccctcttgcaaagcaggagggcgctttttaactgcggaaaatgaggaggaaggatatgcggatcggcaatttggagatcgaaaaccgcgggctgctggcgcccatggccggggtgacggattcggctttccgccgcatctgcatgcagatgggcgcggggctatgctatacggagatggtcagcgccaaggggctgctctatggcggggatggatcggcggcgctgctcaaatacgctccggaggagcgccctatcggcgtacagcttttcggccgcgagccccagcggatcgcccaggcagtggaacgcgtgggggagctgggttttgcgctgatcgacctaaatatgggctgcccggctaaaaaaatcgtaggcaacggcgagggcagcgcgctgatgcgggagatggatgtggcgcatgcggtattgcaggcggcggtacgcgctgcaggcgggctgccggtaacggttaaatttcgtgcgggctgggatgaggaaaaccgaaatgccgttgcatttgcgcgcatggccgagcaggcgggcgtggccgctgtctgcatccatggccgcacgcgggagcagttttatgcgggccgtgctgattgggagatgatcgcccgcgtcaaggccgcggtagggatcccggtgatcggcaatggcgatgtgaccgatggagagagcgccagggccatgctggcacaaacggggtgcgatgcggtgatggtgggccgaggcgcgcaggggaacccctggatcttccggcagatcgcctgcgcgctgagcggacaaccggccccagtgctgcccagcgcaggggagcggatagaaaagtgtatggagcaggcggccatgatggtgcgtgaaaagggcgagcgcacggctttgcgggagatgcgtaagcacgcggcctggtatatcaaagggctgcggggcgcagcggcggtgcggggaaagatcaacgctgtggaaacgctggcgcagttagacggtatcctgcgccaatgccttgctgcaggggataaatagcgcttttggggtgcatgaacagagcccgtcccgaataggataacgcgtaggctgcacggtttgtgccgggcagcttgcacaatccatttgggggagatgaatatactgtggatacgggcaggtggatcctttaccgccccggccaggcggcagcgcgccggaggggactgttttctcgcggcagacgggcgcgccagctggccttaaacggcatgattatggatggagagcgcccgggcggctatgtgctcagcggcgagctggctccgcccgccgcaaaagacccggtccggcgggtggagccgctgctgcgcgcaatggatcagctggacgggcgggtgctgtgcgtcgagcgtggagagcgctttttcagccctggagaacggatggcactggcgcgggaaggggtgcgtctggcgcagagcgagccgctgcgccagatcagcctgttccccgcagcgatgcaggcggcccgggagatgcagctgcgcctggtgctctcgcccgcactgatcgtaggcgcggatacgcccgaagggcgagagtgggccatgctgctgggagatagaatgaatttcatgggactttgcggcagcaatccttatgcgttagagcgcctgtcggaccggctgatggatagctttggcctggccgcgccaatataccgaaacctggaacgcgcggctgccgccagccgcatcgtgatctttgccgatgtcgcgccaaagccgatgttgggcgccctgcagcccgggacgctagccatccttacccacccggatgaccagcgggctttgccggtgccgcagggggttcaactgctgggaggcggtagggtcgcgatgccggaaacggtggccgcgcccctggggctgtcctctagcgagcagcatctggtggcgcagggctggctatatggcacaagcgcgctggctggggacgcacgaagattgccgctgcgcgcgcgcatccggctgtggcgggaaatggaagcggacggtttttttctaaagggcggcggcgcttgacaagcgaaggaccttgcactataatcattaggtctataataaggcgtaatggacaaaatagctgctcatccggcccgtggggagggcctggataggcggatatttttatataggctggcgatgtaaaaatcgccgattaacaagggggaatttttcatggctaaagaagttatgcttacgcctgaaggcgtggcgaaattagaggaaaagctggattaccttaaaacggtcaaacggcccgaggtgaccgagcgtatcaaacaggcgctggcctttggcgacctgagcgaaaatgcggaatacgacgaggcaaaaaacgagcaagcttttgtggaaggcgagatcatcagcatcgaaaatatgctgcgctcggccaaactgattgatgaagatgacctgaataccgatgtggtcaacgtgggcaataccgtgcgggtgttggataaggagttcgacgaggagatcgattatgtgctttgcggctccacggagagcgaccccaatgagaaccggatcagcaacgagtcccctatcggggcggcgctgatgggcagccatgtcggcgataccgtgcaggtggagaccccgggcggcattgtagagcttgaggtgctttccatcagcaaataaggatgtaagcaaaagagagaggatagtatgcaggatcaaatgaagaacccgccccaggcgcaggagagtgtagaggagaacttaaacgagatattgcgggttcgccgccagaagctgcaagcgcttaaagacgaggggaaggatcccttttccctaacgcactatgagcgtacccatgaaagcgacgagatcatctcgcactatgacgagctggagggccagcaggtatccatcgccgggcgcatgacctcgcggcgcatcatgggcaaggcgtcctttgcgcacgtgctggaccgggctggtaccattcagatttatgtgaagcgggacgatgtgggccaggacgcctatacagccttcaagcagctggatatcggcgatatcctgggcgtaaaaggcacggtatttaagacgcgcacgggggagatctccctgcacgtgaccgaatatgtgttgctcgccaaatcgctccagccgctgccggagaagttccacggcttgagcgatccggatctgcggtaccgccagcggtatgtggatatgatcgtcaaccccgaggtgcgcaagacctttatggcccgcagccagatcatcaagattatccgcaggattttggatgagcggggctttatcgaggtggaaacgccggtactgcatacgctggccacgggcgccgcggccaagccctttatcacccaccataattcgctggatatcgatatgtacctgcgcatcgagaccgagctgcacttaaagcgcctgatcgtcgggggcttagagcgggtgtatgagatcggccgcatcttccgcaacgagggcatggatatcaagcacaacccggagtttaccaccattgagctctaccaggcttataccaacctggaagggatgatggaggtggccgagaccgtgtttatcgaggcagccaaggcggtatgcggcggcacccagatcacctatcagggcacgcctgtggacctgaccggcccctggcgtcggctgccgatgatcgacgcggtcaaggagtacgcgggcatcgactttaccgatatcctggatgacgagggcgctcgcgccgctaccaaggctgcagggctggaggttgaggcggatatgacccgcggacagtgcatctatctgtgctttgacgagctggtggaagaaaagctggtgcagcccacctttattaccgattatccggtggaggtttccccccttgccaagcgcaaggtggacgaccccgcctttaccgagcggtttgagttctttatcaccggccgggagatgggtaacgccttttcagagctgaatgaccccatcgaccagaaggcacgctttgtagagcaggcccaaaagaagatggccggcgagggcgaggcgcagattgacgacgactttgtcaacgccctggaggtggggatgccccccacgggcggcatgggcatcggtattgaccggatggtgatgctgctgacggattcctattccatcagggacgtgatcctgttccccaccatgaaattgattaaaaactaggatcgcggtttatgaatagattgttcactaacaggcctttttggcctgttttctttttgcgtatcttgtttaccttgatggactgaaatccagcaataccagcggttctagcattttgccttgcgtatatcgtcgcaagttcgcatttcttaaaaatcttgttttttgatgccggtgtggggtttggtgtgggtttttgcagactccacacgagtaaaactgggaataaccagctgcgccgtctcaagattagcatagcactaaggtagtatatttacacgagggatattaaacacagcgggctacttttttacaaattttgttgatgttataattgtcggatttttacgtcatatacagaaaaacataaatttaatatatttacaaaccatattttaaactgctatactgaagacaaaaatatgtataattcgtgaataaaatttgtaatttatgtgaacacatttagttttggcaacttctaattgcggttactacagcctttacccctttacaaaagaaaaacatgttggaggagaatttcatgtctgccaatggaaagcgccgccttatcgcctttatcctgtcttttgtcatgtcttttacctttttgcagagcggtatttctgccttggctgagggtatacaggacgctaatatgcctcctgccgaagaagcacaggaaccgtccgtggagctggtagaggaacgcgaacccggcgtggctgtttatcaaaatgctgacggtaccaaaaccgcgcgttggtatggcgaggtgatccactaccaggatgaagaaggcgattggaaaaagattgataacacgattcaggaggtacccaaagcgcgcaccttcagcgccaacagccaggaagccggcatgcggtatgagaacaaggccaatagcatcaaggtctacatgggagaaagtgtagaagatcagcttggcgtgaccgtatccgaagacaatggtccatccatcagttttggtattttaacgcaggaggggattgcccaagccaaagctgaacagaaactgttaaaacctttggaaaaagagcaggccctgcgccaggaagccgagcaggctgccaaggtcgaactccaacaggagcatattcaaaaactagaagcgcagacgcatgaacaggctttagcagtaccctctacatcctctgaagtgttgcaaaatagtgcggctgaggtagaggcgattgcatcctctgccgaactagaatcgcaggtaacctctgagcaactgcaggccgatgcacaggcccagttggacgcgcttcaacccaccggagagcagatcgaagctaaattggaaaaattggagcaagcaaaacttcaacgccaagggcgcaagttaatgccccagctggcggaggaatacatcgaaaatgaagaattgccgctaaatgagcattctttagtggttgaagaacctcaaacggaagcgcaagcggccgaagaaaccgatccggagatcggcagtatcctctatcaaaatgcggggcaggatgaggtggacctgcggattatccccgtgggcaacggcgtgaaggaagaactgatctttaacagcaagccttctacctttcgctatgccttcgcgctgacactgcctggtctaaaacccgtaatggatgaatatggtcagatcaatttatacgacaaggacgtggatctagagcaagatccggacgccgagtatcgggcgtatatccccgtgtcattcatgtatgacgccaatgaagaacctttctattctgatcaaatcgtgaccacattagagcgcatcggcaataccgatcagtatatcttataccttgatctcgatgaagaatactttgagaatgtccatctgcaataccccgtaacggtggatccgtctgtagagtggagcatcgagacgccgttcggaacaaaagaggtttattcccaatctgatacgaatgtagtggggcatttatgtgtaggtcaaaataccaatggcacaaaataccgcacgttaatttggataaccgacgactatctggctgattttcagaattattactatttactattagatgcaaactttttagcctatcaggactatacggggtccactagccccacgcacgacatccatcgtgtaactgagaactggtactttgcaggcgagacagcctggaatgacctacactatgatcctacggtttattcttctaattatatccgtcctaaccaagcagcttggtattcttacaatattttcgcactgtttgccggctgggcaaatcaagattatcctaactatggatttgtaattaaatcgcgccaggagaactaccaatggtataaacgttattgcagtctgcattattccgatccgaatttccgcccttatatggagctaaaatacatcggtgaaaacgtggctcccaccatcacaacccattcagacggtcgcaacagcggcactggctggttagatatttcctggccggtaaaggatgactcgcttaattatctggtgggtttctggacggggaaccaatatgagtttattgatgtagaaaatgaaaattcattttctacccgaactgaaggtgtttggcctacggccagccaggggccgcatatccgcacggacggcagcggcaccgatctgcccaatagtccactttctctctaccatgcaaacaatcctggctatgattatcaacattatcgcgtgatttattatccatataatccggcatatggcgcagttcagagtatcgacgcgaactggagcacatgggtctatattgaggactgcaccccgccagaggctgtgggcggcgtaacggctgcgcttgaggagagcgacggcctgatacacctgcgctttaacgccaccaaggatgggcctgatccccattcgtcctggaacgacatagccgccggaatcaaggaatataccatcaattacaacaaacaaaatgctgctggcgtagatgaaaaccaaacttatacggtagccgctacaggggaggctcagtatgagatgaccttctcaccccaggattttcctatggggcaacagagcgtgacattctccgtcagtgctgtggacaattccgatctggccaatttttccgatcccacctattcttctgccgtagaactgccggatcgctccattcccaacgcgccggggcagttcagcgtgaccaatgtgcctgaaagcggcgttatgaacgaaaatcccgaaatgagctggggccaaataactgaccccaagggtgacgataaccgcaaggggctggaatataaaattaccgggccgaataattacgattcaggctatcgtaccataaccctgaacgactgcctgaataaggaggccggcgccaccctgtggaccaattcggcatacgctgatttttccggcctgccggaaggaatgtataccatccacctgcgcgcggtaaatcagtccgaccgcccgggaaccgacgcaacggtgcaggtaaactgggacgccaccgcgccccggtatacactaaccacaacgctggcgtggaaggtgctcagcggctttgtgccgatttacggtgcgattgaagaccccaactttgaatattaccgctggtattatcaaaaaggtataaacggcgagcctaatcctcgggtcatgttttatgaatcgagcactttgcccgctgcgggagagccgctgtgcacgttggattcgacgcaactagagaataacagctattaccgtatagcccttgaaatcgtcgataaagcgggcaacaaaaaaaacggcggcgcctggtatgcctatgtgggccaggagggtatctctaccccgcccaaacttcagatcacccaggcgccagacccagacctaacggtgacggaaccggaaatatccttccaatataaacaggtgattgatgatagcaacctgcagccggccagcctgtatctcggcggcaaaaaagtggctactgaatccaccgtaggcgagggctttgacatcgacgccatcacggagaacctggccgaaggaggaaattattcctatttcatacgggcgcagggttccaatggcgaagataagtataccgtcagctcttacctctcgcccaataacgtgcaaggttttaccgctgattcggacatcgacgttgcttctaccaacgtacaggtcactgcacagggtgctaaacaggcgtctgatggtctatcggtcctctatggcccggagctgccggccaataacgtatccaaaatcaagctgatccccacgctggcggacgcctccctggctgcacaggtgagctatgaggccagctttgatggcggcgctacctggcagcccattgccgctagccaggagtatctcgtgcaagacgagctggggcaaagcgtacagatacgcgctacctttaatagcgctggtgtagccattaaaagctggaatgttcagatcacctcattgaacttgaacgatagctttatcgtgcagttggtgacgcaggcacagcggcccacggctatgagtatggtcaactactcgatatggctgcgctgggacggcattttgggagatgatgaaacctactctgtttaccgcggcactacgtcggactttgagcccgacctggtgaatcatacaaatcgcattttttcgggcttaacgcagaactatatttacgatatcgatgtcactaaagatcaaactcactactatcacatcgtggcggaacgcacctttggcgaacggatgcgtatcggtcttccttccgaccagacctacgctacggttgtacctgaaggtgagctggaaaaagcgctgggcttaaacggtacttcaagctacagtagtatcggccttggccagggtacggcctacgtcaatgtggccagcggcaatctggtctatcaagttacggatttcagcaaggctgagcacctgctctccatgtccatgagccgcaccttcaactcccaggcgcgtgcggaaacatcgctgggccgtggctgggactttagcttcaacaccagtctgttgcgcctgtatgacgatgatcttaacgagatcggcctgattctcaaggatggagatggttcagtccataaaatcttaaaggatccggataccggagcgttcattcctcctgccgacgactatatggaggtttccataaacgaacagggcaaatatacaataacgcgcaaaaataatattacctatacattctcccctgaaacattgcagctggaaagttaccgtgagccaaatggcgtagtcttatttatgaactacgatagccgcgggcggctgatctccgtagaacatatcatgtccgagggcgagatcacctttttgtacaacggcatggataaaatggtgggcgcttacaaccattttaacttgtatgaatcgctggaggctcagtacgattatggcgaatacggttgggtagacgaagcctacacgtaccgggatggcggcgaaaagatctacgagcgctattcttattacgaatcctcctggccgggtaatgaggagcatgacccgaccgtaaccggtggctttgtcctctacacgcctaccaacggggcgagcggtaccgctgaacggttgcaggatgtgcgcattcaggattccaaagtgcaaatggtgatcgattcagattttacgacctactggttcacctatgcttctcagggcgagggagatgcactgaccaatacgacgactttgcagcagctggtcaacgatggcagcggcggcgatggacccgttccctttgctaccagcacgttcgttaccaacgcacagggcctgctcaccagctttacagacgcaggtgggaacaccaccaccatcggcggctatgcgccctgcatgaaacctacatcgatttcgtactatcaggacgcggcgcacaccaaactgttgaccaccactatgacctacgacgccaagggcaatatgctgtccagcaccgatcctcagggcgcggtgaccagttatacctatcacgaaaagtggaacctgccgcttaccgtggccacgcaaaaggacgcttccaccaccctgaccaccacctacacctacgataattacggtaacctgcttaccactaccgattcgatgggcaaggtgaccagcaatacctacggtacttacggcctgctgacccgcaccaccggctggaacgacagcgaagtgcgctatgtgtacgatgcgcgcggccgattgaccgaacaatggaacaaggtaggcgtttctggcgatgccattcaaaatgctatcgcttacgagggcggcctgtacgataaacagacctacacttacgatgagcgcgataatcttgccacggtgaccgatgcgctgggtaacactattaactacgcctacaacaatttgggcaataagaccgcagccacctaccccaacggatataaggagacctggcaatacaaccgcaacggcttgctcacacaggcggcgcacaacaactccgccaaccccggcgggcagaccgtcacaacacagtatacctatgatgatctaaaccgcatcactcagacccagtttgccgatggcacgcaggaaacgaccagctacagttatgaaaccgtgggcggcgcgctctgctttgtggtgaccgctaccgacgccaacggcgtctccagccgcacggtcagcaatcacctgggccagaccgtggagaccgtttccggcgggttggccgtgcagtacgcctacgacgcggccggcaacatgacccaggtgaccaaccccggcaaccgcgtacagcaggccgagtacgacctgatgaaccgcgtggtcaagaccagcattccggataccagcctggggaccatccagagcacggccacctacgattacctgggcaacaagctgaccgagaccgacgcgctgggcaacaccacccgctacacctacgacgcctacagccgcccgctgacggtgacccagaccgtggacggcgtggaccagaccaccagttatacctatgatgagatcgtctccaccggcgtctacaaaaacacggtgaccgacgccgagggcatggtctccgagacacactacaaccgcccgggttgggtgatcaagacccagaacatgggcaagggcgctacccccctgcccgcccaagtgacgagctacaacgtactgggccaggccctcaccctcaaggtgaacgacgagctgcgcgtgaccaacacctacgacccggtcaccggcctgctgaccaaaaagcagtacagcgagcagtattataccgattacacctacgacctggagggccgccagcagaccatgaccgaccactggcccgaccagccccaggcggtgaccagctacacctacgacatcatgggccaggtcacccagtcccaccaggacggcaacaacatcaactacacctacgacaacgtgggcaccattacaaaggtggattacaccatcgtaggggcctcgcgcagtgtggaatacaactacgacagccgctacaacctcacctccatcgtgcaggacggcaagaccgtggcggaatacagctacgatgagagcaacaacgacctgctgagcatcgacgagtatctccagtttgatacccaggccgacaaggcggggctgaagctgcagcagaccttcgactacgaggagaagctgggcctggtgctgaacaacaccatcaaggagggggctgcgcagcgggagagctatgactatacttacaacaagctgggcttcgtcacccaggagacggtgagcggcagctatcccgacaagagcaacagcgtgaccaagacgcacacttatgacgagatcggccggctgacccagacgttaagcgacaacaatgggacggagaagacccagacctatacctacgacaaggtgggcaaccgcctgacgatggtagacggggaggacgaataccgctatacttataatgactacaaccagatgacgaaatccgagaagaagcaggacggcgccttctacctggataaggaatatacctacgatacttatggcaaccagacccagaagaaggtgtacaagaccgaggaaggggtcaacacgctggaatccaccacggattatacctacgaccaggccaaccagttgagcaccacccaccagacctttgaggacgacgggcaggacgacattaccacggggaacctgtacaacggcaacgggcagcgcatccggttgacctggaacgggagcctgtaccagaagtactattacatggggagcgccctgttctttaccacggacgccaacaacctgcgggattcggagaatatcctaagcccgggcggcagtatcgtggccagccggcggcaggacagcagcgacgcgaacaagtactacttctaccacacggatatccgcggcagcgtgaccaacatcgtggggacgaaggagaacgcgatctacctggcgcaggggtacaactacgataacttcggcaaagaggaggagctcaagagcgagagcagctttaagaacgatgtgaccttcaccggggcggtcagcgattccatgacgggcctttactacatgaacgcgcggcactacgacccggacacgggccgcttcctgcagcaggacacctacaagggcagcgcagcggtgccctggacgcagcacctgtacgcctacacggggaacaacccggtgaacatggtagacccgacggggcattcggcgtctatgtacgatcaatatccggatccttcgtattcgggtatctatgtaaaaacggagacggcgacgatgacgaaccagtatcccaattcgtcatattcgcagatctatgtagatccgccgccgtcaacgatgacggatccgtatctggatccggcagatgctaggatatatggcgagcccgttaagattacatcgtccacaccgatagtgtatcattcatcatcttctatatcttatcctggttcacctagtggaaatggcgcgataagttatggtggaacaaaacaagttctatacagcgaaattccatctgtagcgccgcacaatacactatccttccagccggttgctgttgtgtataccaaagtacccgaatatcctggtacatatacgattggcttcggtgtaaatgcctcctcaggtttctggagttacaatggacaagtggggttgtcttgggataatcagggtaatattgcattacagttaacgactgcttcgggcccgcagacaggtaccccaggaggttcagcaaattgctttttaatgcgtacaaatgctccaacagtacgagacttaaataaagatggttaccaagttggtgcttcaggtggtggcccgattgttctgggatatgaccacaatatattgcatgataaagaaaaaaacacatattatcatggcgatacgattagtgcaggcttggggacgcctggggtagatttccatactgagtatagctatacatggacgccatggcagattaatttgtatggtaaaccaataaactagaaaggaacttatgcgcatgaaaataaaaaggttactcatagctttttcgataatgattattggcatattaagcttaactgattcggcgttagctgctacgaaatataagacgggcgaatatagtgctgaacgtcagaaagaactatttgatatctttgcaataaaaccactagaagattttgaacctaaacatcccataactagctttgatgtccgagaggatgggtatatactggtgggcacgcaggactacgatgataatgaaattttcatctatagtccggatggaaggtgcgagtacggatattcgtttcacacctcaaatcagaactatgtcgtttggaatggcgattacattaatatatttgtagtgcgctcatatatagtaattgaattcgataagaatggagaactgatagaaatatatcctattgacggtgcaagaggatttagctggaatttgtttgatgaaaccagcatgaaagcaaatggctatacatttaaactagaaaagggtaatggtatagcttcatggctaggcccttcttatcctaagcttgtaaaaattagcccggatggaacaagagaaatactctatgatgttgcgcaggcatatgaagcgaaagttacgacaatctttgttcttatactctgtggtatcgcagttggattggccatcgttattcatatagcgattgaccgtaaaaagcgctatcgtgtgtatgaggacaaacagaatacttgaagacaaatgtaggagtactcatgcaaaagaaaaaactgattctcattaccggcgctatagcgctagccgccatcctcgcggttatactcatcttctgtgtcccctggagggaggaggagcccgctccccctacctccaatgaggcgctcaccagcccggatgcggtggtcggactggtctgtgacctacaaaccgaggacgtggcgcagtttaaaagcgcgctggagacggcctgcacccaacgcaactggcgcctgcaagccctggacgcggacggcagcagcggcatggccatcgcccaggccgagacgttgatcgcctccaaggtgggcgccatcgtggtgcgttttaacgatgaacctacgcttcaaaagatcgtgttcctggcccaagaggcggatatacccgtcctcaccgttgaccggcagatcgaaggcgtgccctacctggggccggactgggagcaggcggacgcccaagcggcggattacctggcccagcaggtccagtcccgtctgggcgggatggatatgttgatccgtctggaagataaggatactctttctcccgctatgggccattgggccactgtggccgaagggttgaaggccaagctgcccatgccggacgatgcctataccttccaggccgacgcccgcggcacccagcagaacgctcaggacgagatcgcacaatactttaccgactatcccgatcgggagcaagtcgtgatcctctgccagaacgaatcttacgctcaggctgcccttgccgcggcggaagaagccggcaaagccgatcagagcgtgatcgtcagcgccggggcctcgcacctttccaaagatacgctggcggccgaaggccagcccggctggatcgccagccgtatcatcgagcaggaaccctacggcgaacagaccgccgcgatgctggaaaggctattgatgggagaaacgccggaggataccttccttcagcccgtgatgattgatgcatcaaatctgtcacaatatactgcccaatagttcgaacactgaagcccgcattctgcgggcttttccttatacacaaaagggcagttggttaaagataaggaggagacagcacgataaaaaatggttagaagaaaaattagcggctatccccgaagatgagccagacaagctagacaaggccatgagtgctatggctgaagaataaaaatccctgcaccagttacatggggtgttgcttgtaaagcaaatgaggtaatgcagattaagccaaagccgggaaagaaatgcgcctttttcggccattttttaggggcggtgtggggttctcgttttttcaaatgataaaaccaacctatttttgagaactcaaaaaccgactatacggcatgaataggcggttgtacggatttaatggacatcagatgcagcgaaaatagtttatgaatagattgtaaataatctcgcaggtgcgcagggccaaggctctgcgcaccttgtttaacgggtaaaaatcccgtataataaagccattaagcccagaagaaggtgcatccatgaaacaggggaaactgacaaaggccaaactcgtatggcatctcaaacacgagtattggaaatatatctgcgcaattttaatcgtagcgattgggtgccatatgacggtgctgctcacccgcccgcgggtgccggacgagcagcagctaaacgtttactacgccggcccttcggaggcgtacgatcaggtaatcatgttcggcgaggagatcaaaagcgccttcccgcaactgcaggaggttaatgtcaacgtgatcctgtattcgggcgccaacgactttagaggccaccagcagggcggcatttacctgggcgcagggatgggggacgtatatatcgtccatcaagacttctttaattcctttgcctcatccagccagcaggatttctggaaaccgctgaatgacgcgatcgactccgggcagatagccctgcccgaggggttagatctggacaaagggcatgtgggcgccaatgcggtgctggagatgggcctctccctggatgaggcgaccgagcagcagaaggcgggcaaggagccggatgagaccacgctttctcccggcattccggcctttgaggaggatacggtgcggggtatcccgctggacagcctgacggggctgaaggccgccgcggggatcgatccagcggatatggtggtggtgatcccgtacttcgccgagaaggacgagatggtgtacgagtttatcagttacctgtttgagaattatcgttaacaaggcattgccttatggccgcggctttgaaaagtgaaggccgcggcctttattcacgaaggggagagtccccaataggatagggaggatatcaggccatgttggaccgggaaagccgcgtactggaatttggccatgtgctggagcgcctggcggctcaggcgcgctcagcgccgggcaaagcgctgtgccaggcgctaaggccccatacaaactatgcgcaggtagccgatgcgcaggaagaaacggcccaggcggaagcgatctattataaactggggtaccatccggtgcccgagtttcaagatattttgccgctgctggcccgggcgcaggtgggcagcatcctttcggccggcgatttattgacggtgggggatgcgctggcctgtgcaaggcaggtcaaagcgctgttgcgccgggaggaagaggatgaaccccccaacggcgtgcgggatatgggcgcggcactgtacgagaaccgggacctggaagaggatatccgccggtgcatcctttccccggaggagatcagcgattttgccagccctgagctggccaaaattcgccgccagatccgctccggcggcgagcgggtgacccaaaagctgaacagttatttgcataacccccagctgcaaaaatacctgcaagagcccattatcaccatccgggcggatcgatacgtgctgcccgtgcggcaggagtaccgcagccaggtgccgggcctgatccacgatcaatcctccagcggcgccacgctgtttatcgagcctatggccgtggtcgagatcaacaacgagatcaggcagctgcgcggacaggagcgcggcgagatcgagcggatactgggcgagttttcggcgcgtacggcgggttcgtctgaggcgctgcggcaaaaccagcagatattgaccgagctggactttatcttcgccaaggcggcgctcagccgcgagatgcggggcgtggcgccccggctcaaccaaaaggggattctgaatattaaaaagggccgccaccccatgatcgaccgggaaaaagtggtgccgctggatatccacctggggcgggagtttaccacgctgatcatcaccggccccaataccggcggcaagaccgtggcgcttaagacctgcggattgtttgcgctgatgacccaggccgggctgcatatcccagccgagctgggcagcgagatgccggtatttgaggcgatctatgccgatattggggatgagcagtccatcgcccagtcgctttccaccttctcctcgcacatgacgcacatcgtggagatcctggaaagtgcggggaaggattgcctggtgctgctggatgaactgggcgcgggcaccgaccccaccgagggcgcggcgctggccatggcgattttgcagacgctgcaaaaccgcggcgcgctgaccatggcgaccacccactacagcgagctgaaggcctatgcgctgacccagccggggatggagaacggatcggtcgagttcaacgtagagaccttaagccccacctaccggctctccatcggggtaccggggcgcagcaacgcctttgagatttccaggcgtttggggctgacaggggacatcatcgaaaaggcgcgggagttcctctcggctgaagatatccgctttgaggacgtgatttcttccgctgaggaaaaccgcttgatggcggaaaaggagcgccaggtggcccagcaggcccggcaagaggcgcagcaggcccggctgcaggcccagcagctggaacgggaactggccgcacagcgcgaaaagatgctggccaaggcgcgcgaacaggccagaagtatcatcacccgggcccaggcccaggccgaggagaccgtaagggagctcaaacgggtaaaaaatgcccaggatcaggcggagcgcgataaggtgatcgcccagcagcgcagccgcttgcgcggagaactgggcaaggtattggaaaccgtaggcggccctgtggccggttccggccagccgcccaaggatctaaagccgggggaaacggtcaaagtgctggatctggatacccggggtacggtgctcacccggccggacgccaagggcgaggtgcagctgcaggtggggatcatgaagctctccagtccgattagcaacctgcggcgagtggaggtgcagcagacggcccagccggcaaagcggggcgggggcaagagtgttaagctgaacaacgcccgcagcgtgaacctggaactggacgtgcgcgggcaaaacgtggaagaggcacttttagaggtggagaagtttttggacaacgcgctgatcagcggtctgagcgaggtcaatatcatccacggcaaaggcaccggcgtactgcgcagcggcatccagagccatttaaggcaccacccgcacgtagccgaattccgcctgggccgctacggcgagggcgagggcggcgtaacggtggtaaagctgaaataaaccggctttgcggcaggattttggcgcgcggcgcagaaaatatacagggtggattcaatggcgcctgtagagattggcgcttggtgaataagaacatgagggggaaacagaaatggcatatttattgggcgtagatatcggcacatcgggcaccaaaacggtgatgtttgatacgcaggggcatacggtagccagcgctacggtggagtatccgctttatcagccccagatgggctgggccgagcaggacccggaggattggtggcaggctacggctgaaaccattcgccaggtcatcgccaagagcggtgcgaacccggaggacatcaaaggcatcggcctttccgggcagatgcacggcatggtgttgttggacggggacggcaaggtgctgcgccgctccatcatctggtgcgaccagcgcacccaggctgagtgcgatcagatcaccgagctggtgggccgggaacggctgatcgagatcaccgccaatccggcgttgacgggctttacggcctccaaggtgatgtgggtgaaaaaccaccagccggagatctttgaaaagacccgcaaggtgctgctgcccaaggactacgtgcgttaccggctgacgggggagtatgcttccgaggtttcggatgccagcggcatgcagtttttagatgtacccaagcgcacctggtcccgcgaggtactggagaagctgggcatcccctacgattggatgccggcggtctatgaatcccaggaggtcagcggcaaggtcacccgcgcggtggcagagctgacggggcttaaagagggcacgcccgtggtgggcggcggcggcgaccaggcctcgggcgccgtgggcaacggcatcgttaaaagcggcattatttcttctaccatcggcaccagcggcgtggtattcgcctataccgataaggtcagcattgaccccaagggccgggtgcataccttctgccatgcggtgccgggtacctggcacatcatgggtgtgacccagggggcgggcctctcgctgcaatggctgcgcaacgagtttggcggggaggaaaaggatcttgccaaatttatggggatcgacccctatgtgctaatgagcgcagaggccgagcaggccccggcgggctgcaatgggttgatctatctgccctacatgatgggtgagcgcacgccccacctggacccttactgcaaggcggcgtttttcgggctttcggcggcccacgggcgcagcgatatgatccgcgcggtgatggagggcgtctcctacagcctgctggactgcctgaatatcattagggagctgggcgccccggtcagcgaggtacgcgcttcgggcggcggcggacgcagcaaactgtggcggcagatccaggcggatatgttcggccatgatatttataccatcaactcctccgaagggccggccctgggcgtagccattctggctggcgtcggcgcgggtgagtacgacagcgtgccccaagcctgtgaggcctgtatctcccgggtggatcagctggagcccatcaaggagaatgtggagacctacgccaagttctatcccatctatcaggaactgtacactgcgcttaagccctcttgcgataaggtggcgcagatactgggacagaagtaaattaagttagcaaagggtggaaccaggcgcatttcgcttggttccgcttgttttaaaatgtattgaaggaggcggaaaatatggcagcgccggatattctcatgattgacgacgacgaaaatatttgcagactggtaaaactctatctggaaaaggaaggctacaccttgcagctggcccatcgcggggatacggggctgcagcagttcagggagcagccgccgcagctggtgctgctggatgtgatgttgccgggcttggacggctggtcagtcctgcgggagatccgcaagacccaccgggtgccgatcatcatgctgaccgccaagggcgaaacctttgataaggtgctgggcttggagctgggggcggatgactatctggtcaaaccctttgaacctcaggagcttctggcacgcatccgggcgatcttccggcgaatgacgccggaggagccgcaggacaggatcatccgctacccgaatctggagatcaacctggccaactatgtgctgaccatccacggcaaacatatggagctgccgcctaaggagatcgaactgctgtatttccttgccgggcatgctaaccaggtgttcacccgcgagcagctgttagaacaggtgtggggatttgattattatggcgactcgcgcacggtggatgtacacgtcaaacgtttgagagagaaactggggcaggatgacgaatggcaaatcaaaacggtgtggggcgtaggatacaaatttgaggtgaaataatttatgcgccgatcactgtacgcgcggctgctggccacctatctgggcgtgatgatgctggccctgatcgggctgggctttctgttcagtcaaatgatcgtgggggagacctatacccaaaagcgggatatgctccgcatcgaggcggggcggctggcccagtatgccgcgagagattactttactgtcggtcaggtcaccaaaaactttggggaggatctgatctattccgccggccagtacaagatcgatgtatggctggtaaacctgcagggcaacgtcatgcaggtgcagggcgcaggccagccggcagagcgctccatcgaatccgagcagctcaagggctacctaagccgcattatgaacggggagaccgttgagacgatggggaatttaaacggggtctattcccgccccatgctgacactgggtatgccggccaaggatcagagcggcgccgtgttgggcgcaattttcgtacatacgccgatggacgaaatgaatatggcgtttatgaatatctacacccgcgtcagctggctggcgatcatgtcagccgggttgggtgcagtactgatggcactggtcacggcaaggatcacccgtccactcaagcagatgaacctggccgccagcgagatcgcccacggcaagtttgaccggcgcgtagaggtgaccggggatgacgaggtgggccagctggcgcgcaatttcaacaaaatggccgaagagctcaaaaaactggaggagctgcgtggcggctttgtggccaacgtatcccacgagctgcgctcgcccatgaccagtatgcagggctttgtgcagggcatgctcgacggcacgatcccgcccgagcagcgggattattacctggatatcgtattgcaggagaccaagcggctgacccgcctggtcaacgatctgctggatctgagcaagatggaatcgggcaatttccccctgcagtgcagcgcctttgagcttaacgagcgcatccggcgggtgctgatccgctatgaagggcgtatcgacgataagcacctgcaggtacaggtggatttccggtcggaaacctgtatggtttgggctgatccggatcggatcgaccaggtgctgagcaacctgatcgacaatgcgatcaagttcaccccggaggggggccagctggatatttggacctatacctccaccggcaaggcgttttgctgcataaaggacagcggcatcggcttaacggaggatcagcttcccttcatctttgagcggttctacaaggcggataccgcgcatactcctggcaggggcacgggactgggcctgtcgatcgtcaaaaagatcattgaggagcatggacagaccatcgaggccaccagccaggctggcaaggggacttcgttcgtattttctctggccagctatcaggaaaagggcaagctgctggaaaaacgggcgaaggactttggcggcgacaaggcgcgcgagcgcgaaaaagaatgagagagggcagggttttctttttacagcacgttcatactttattaaataagccgcattataataaggacagttggacagaaataagatgacaatgcctatcaaggagtgaaattgatgaacgattattattatgacccgcgtccctcacacagcaggaagtggttggtcttatccctggtgatcgttttactgatcatcggtgggctggtcgtcgccgtggcgatcgagcatcagaataacgacggtggctctcaggcagcggtgcccacggctagcgcggagacttcccccagcgccagcgcttctaatggaacgcagaatacctcgggcggcgaggtagcgctgggcggctcgctcaaggaaatgcaggaaaatgaggacgccgtcgtgcaggtggcagagaacttgacgcctagcgttgtctctatcgtggggaccagtgccagcagtatgggcagcgggacctccgtatcctccggcagcggcattattatctccgaagaaggctatattttaaccaataaccacgtggtggaggacgcgcaggtcatcaaagtggtgctgctggacggcaccgaggccgaggctaaactggtgggccgcgatgaggcgaccgaccttgcggtcattaaagtagacctgcccaatctggtagcggcgcccttgggcgattcggacgccatcaagaccgggcagatggcgatcgcggtgggcagccccttgggcacccagctttccggcacggtaacggtgggttatatctcggccaaggatcggaccattaccaacgaggcgggccgtaagatgaacatgatccagacggacgcggccatcaaccccggcaacagtggcggcgcgctggccaacctgaagggcgaggtcatcggcatcaatacttctaaaaataccacgatcggctacgatgagtacggcaacgctatttcggcagagggtctgggctttgcgatacccattaacgacgccatccccgtagcgcagcagctgatcgccaacggcagtatcccgcggccttgggtaggctttacctatacccagtttaccgagcaggatgccaagagctataatatcccggtggggttgttcgtgcgcagcgtggtatccggcagcccggcggataaggccggcattcagcagggcgacctggtgaccgaggtgaacggtacgccgatctcggatgatgtggatatgcaggatatcctctcgggggtgaatgtagggcagaccattaaaatgaagatctaccgcgagcagttgaaccgcgagatcgaggttgaggtcaccttgggggactacactgattatgaaaaaatacaggaacagcagacccagcaacagcagggcggccagcagccatggggccgttagggttagcgggaaaatagttaaagcgccggagaatttctccggcgctttttgtatcacagtgaaaaaggtaaaataaaatgcggctggataaaagcccagccgcatttgtatgatggatggaagcgcttacagcagctccgcccgaagggcctcgccgctcttgggcgaaagataggccggagcaatatccagcaccgttttggcgccgctttgcccctccttggccaagcgatacgctgcacgagcataagccaccagcacgctggaggtgaattctgggttgctctccagcttaagggagaactccatcacctggcgggtgccttctccggtctgcccgctgcggatcacgaaaccgccgtggggcatcgcggcgtgctcgcgccgcagctcctcttctgaaataaagtgaacggtggtatcgtaatcggcaaaatagttgggcatttctttaatggttttctctaccgccgctgcgtccgcgcccggctgcaagaccacaaagcactcgcgcagatgtttttcgcgcgtggtaaaggccggcgtttcgccgccgcggatgcggtcgatcgcgctttgcacgggcaccgtatactgcttggcatcctttacaccgggcacgcgacggatggcatccgagtggccctggctgactccacgcccccagaaggtatagctggcgccctggggcagggaggcctcgccgagcagacggttcagagagaacaggccgggatcccagccgacggagatgatggccacgtgcccagagcgggcggccgccgcatccaccgccgcgaagtgctgcgggatcttggcgtgggtatcaaagctgtcaatggtgttaaagtactgggccagctgcgggccttgctcgggcaggtcagtagcgctgcccccgcacaggatcattacgtcgatctccgcttgcatgctgggcgcatcggccagtgcaaacaccttggcgcccggcgtctggggcacaaggcttttagggtcccggcgggtaaaaataccggccagttccatatcctcattttgctgcagggccagctccaccccgcggcctaaattaccgtaacctgcaatacctactttaatttttgccataaacagtcctcctttgaagtccatattcctccgtcatgataacgccagaggtggccctgcgtcaatgttcgctttcggattcttccggtggcgtctggggcggcagtttggaaaccagcgcccactctacgcggtgctcgatcagttcctctacctcgatgtgcaatccggccacttcgacggtcacccggctgccatcctctgggatggcggtcagctggctaaagaccagcccgcccagcgtatcgtattcctcttcggtgggcagttccatctccagcgcttcacccagcgtctccaaatcgatgccgccggacacccgccacaggttttcggccaggggctggagctcctgcacatcctgcgggtcgaactcatcataaatattgcctacgatctcttcgagcaggtcctccatggtgaccagtccgctggtgccgccgtactcatccaccacgatggctagatgggtcttggtcttttgcatttcgcggaaaaggatgtccgcccggacggattccggcacgaagtaggcggggcgcatgatttttgaaagcggcagcggattttcgtgccgctggttgagcaagaactgccgggtggaaacgatgccgcggatatcgtcaatatcctccccataaacggggaaacgactcagcccggtctcctcgatcagggcgagaatatcctcaggcgtatcgtccaacccaatgaccgacatgtctgtgcggtgaaccatgatttcctcggcggtggtattgttaaattcaaatatattatcgatcatttcccgctcgtccgcggcgatggtgccccgttcctggccaatatccaccatcaggcggatctcctcttcggttacggcttcttccttctcggcggggtcaatgcgcatcaggcgcagcacgccgttggtagaaacgctgagcagccagacgatgggcttcatgaccacggagagaaagtggatcacgccgctggcggcgcgcgccaccttttcagagcgcttcatcgccacgcgcttgggtaccagctcgcccagcaccagcgtaaaataggaaaggatcaaggtgatgacgataatcgaaatgacgtccaacgtctgctcaggaaggacggtgaaaccgcaatcctttacaagaaactggacgagcttatcggaaaagttttctgcggcaaaggcgctggctaagaaaccggccagcgtaatgccgatttggatcgtggaaagaaagccggcaggcgtttgcaccatgcgcagcatctgtttggcctttttatcgccctgctccgcctggtggcgcagcttgttttcgttcaaagagatcacggcgatctccgtggcggcaaaaaaggcgttgagtgcgatcagtacgacttgcagtaaaagttgactccatatagggtccggtgacaagaagattcccccttttaaaattcatatcttttttagtataacataccgcccaggaatttttcatcacccaatatcggtcaaacgcgccctatttgggcgattttgggccctgacgcgcactgcgcttgacaggccaaagcggcgcccgctatacttttgcctagaggcgcggcgcgcaaggaaggggaaggaataagatggccaaagcggaattttctccatcgctgatgtgcatggatctgttggaactaaaagagcaggtggcctttttaaacggcaaggcggatttctaccatgtggatattatggacgggcacttcgtcaaaaacatcacgctctcgccggactttgtgcgggcgctgagcaggatcgccacaaagcccatcgattgccacctgatggtgacaaacccggaggattatgtagagagcctggcaaaggctggggcgggctatatcaccccgcatgcggagaccctttgcaaccaggcctttcggatgatcggcgcgatccgcgatgccggatgtaaagtaggcgtcgcggtcagtccggcgacgccgctgggcatgctggagagctacctgcacctggtggataaactgaccattatgacggtggaccccggttttgcgggccagccctttatccgcgagatgctggataagatcgcccttgccgcgcgattaaaggcggaaaggggttatacctataagatcgaagtggatggctcgtgcaacgtgcgtacctataaggaactgtacgcggcgggcgtgcaggtgtttattctgggctcctccggccttttcgggctggacgccagcctgcccgcagcctgggaaaagatgtgtgcgcagtttgcccaggagacgggagcatgaacggcgcgaaggtgttgggtatagatatcggcgggactaacctgcgcatgggcctggtggaccggcagggtcgagtggaagggttgcaggtgcaaccgagcagcgcattacttgcgggcgagccgcttgacgcactgtacggcagtattgaagcctactgcaggcaacaggagtctacccctttggcggtggccatcgggctgccttccagcatcagccgggaccggcaaagggtgtattccacacctaacctgcccgggtttgacgatatagagatcccgggcccattgtcggcgcggctgggatgtccggtattcttggagcgggatgtgaattttttgctgcagtgggatatctgccagtgcggcctgcagggactggaaaatatcctgggcttttatgtgggcacgggctttggcaatgccatttatctaaacggcaggttctatttaggcaaaaacggcgtggctggggagctggggcacatccccttttatggggtggaagaggcttgcccctgcggtaatacggggtgcgcagaggtgcgttgctcgggccgggcgctgcaaaaactggccgcccggtactatcctggcgaggaaatggggcagctgtttctacgccatgggcaggaggcaccgctgcgccagtttatacaggagctggccctgccggtagccaccgaggtcacgctgctggacccggacgtggtgatcctggccggcggcgtggtggcgatgccgggcttccctaaaaagatgcttttggacgagattttacaccgggtgcgcaaaccctatcccgcccagggattaagggtgctgtttccggagcattccaagcgcagcggcgtagctggggctggactctatgcctttgagcggctgccaaaccgttaggagggattgacgatggaaaagcagatgccggacgaaaaaacgctgcgcgccctgatggggcaggaaaagtatgcggcttttgccgcggccgccgcgatgattgaggatagctatgagatggagaccttgtgggggccaggcggcaaggccggcccgtatgagctgaaataccgccggggaggcaagacgctgtgcgccttttatccccgggagaattcgtttgggtttatgatgatctttggccgggcagagcgggagaagtttgaagccatgcgcgaagaattttctgctgagacgcagcgggtttacgatgaggcgcatacctatcgagatggcaagtgggtcatgtttgagagccccgcagaggaacatctggcggagatgaaaaggctgttggccatcaaacgccggccaaatcggaaatagcacgcggataaagtttgagaaagggtagcagatttgttatactgatgtgcgtgaaatgcccggcccaagtgaggggccgggctatcgatatgcttttgggaggggttgctttggaacgcaacaagaagttgaaaagactggtgctggccgcgctgttcgcggcgctgagctgtgtagcgacgctgattatccagatcccttcgcccatgcaggggtatgtgaacctgggggattgctttgtgctgctgggcgcgtacgcgctgggacccatctggggcggggctgccggcggcatcggttctatgctggcggaccttttggccggctatgcccactatgcgccgggcacgctggtcattaaggcgctcagcgccttggtggcggcgctgatctttaagacgcagaaatcccgccgcagcgtgctgccggtggttttgggcggcctggccggcgagacggtcatggttgccggatacttcggctacgcctgcctgctgctgggcaaagggctggccgcggctaccagcataccgggcaacctggtgcaggcggcggtgggcatcatcgcctcaacggtaatgatccatctgatcggccgctcgcccaagctctaccaatacttggagcgttagccggtgggcgcggatagaaggcggctggatgggccggcctgccggaaagtactggcgcagggcagatggggcacgctgtgcaccgccagcagggatggagcgccttatggcgtccccctcaactatgtgtttgtgcccgatgaggatgcgatctattgccactgcgcgccggtggggcgaaagctgcgcaacatagccgaaaacccgcgcgtgtcctttgcggtggtgggctgggagcaattggttccggaacggtttattaccaactttgccagcgtgatggtcgaagggcaggcccggttagttatggatgcagatgagaagcgccgcgcgctgctgacgctttgcggcgcgctggcgcccggacaaccccggcgcgatgcggtgatcgctcgctatctccaaagtgtagccatcatccggatcgatatcctttcaatcacgggccgcgagaaccgggatgaccaggggttgcgcgcggatgattgacagcggcctgcaaaatatgttattttattgaatgtatggtgcatatgaagtgcgctgcgtgcggcagaaggccgccggcaagacggaaagattagtgattttataaccgcatagggatcagacttgtagtctgctattgtaaagtcagaaggcttctattttctatagaagtctttttcttttgcttgagggaggaaaaccaatggatctaagtgcgatccgtacggcctggcagggcggcaagggcgaccgtaaggcctcggccgaactgtgggacagcctttcacctcggtataggctggacgcgctgccggatgaagggcaggatagcctgcttaagctgatcgccggaaaaggactgctgcccaagggcgggcgcgcgctagacgtgggctgcggcggcgggcgatataccctggcgctggcgcgcaagggatatgcggtcaccggcctggattttgcgccgcagatgattgctgccgccaaagaaaatgcgcagcggctggacgtgtccgccgcccgttttttacaggcggattgggagggactggacctgcgggaagcggacatggaaaaggcctttgacctggtctttgcccatatgacgccggcggtgcaatccgccgcgggctttgaaaagctgatggctgccagccgtggcgcctgtatcttgaccaagctgacccgccgcagccacgcggtgcaggacggggcctttgcgcagttgggcatgcgcccctttggcaatgacgataccatcgcttatgcctttgacctgctgtggacgctgggttaccagccacgcatcgcctatgaggcgcggcagtggatggggcgcgtgccggtggagcagatgcatcaggagatctgccggcgggcggcggtaacgcgggcgttgaatcctggggaacaggacgcggtcttgcgctatctgcagggcctggcacaggatggaatgatcgaagagaactcgcgcgccacggcggtaacgctttactggcgcgtggatgagtgatgactgaagggggattgcgcaaatgcagagcaaacaggaaatgtgggaaagggccgcggccttccatggccatgtgtgcggggggctgaccatcggctttcaggcggcgcgctatgcaatggaactgttggagatcgatttttctaaggatgaagacgtggtgtgcgtaaccgaaaacgacgcctgcggagtggacgccatccaggtgcttttagggtgcagcgtgggcaagggcaacctgcttttccggctgcggggcaagcaggccttctcctttttcaaccgcaagagcggcaaatcggtgcgcctggtattgcgccccgggccggacatgccccgggaggcgcgccagcaatacctgtttaatgcggattataaagacctgttcgacgtaaagccggtgccctttgccctgccggagcgggcacggctgtttgcctcccagccctgcgcggtatgcggggagaccacggccgaacagtggctgcacgcgcaggaggggcagctggtctgcccggattgctttaaggcctacagccggttcttttaagacggaattatcaataactaagatgagggaaatgaaatgtttaaaaaagcaattacaatattgatggccctgtgcctgctggccgggtgcgcgggctgcgcatccacaccggcttccggtaccgcggcggatgcgccacagacctgcgccgcggcgtcgggcacggcgcaggcggataccgtgaccataaccgatctttacggccggcaggtcacgctgccacgggagatcaaatccatcgtttgcaccggcgcgggggcgctgcggatgatctgctacgcccaggcgcaggacttagtcatcggcgcggaggacagcgacaagacccagaccatcaagcgcggctacaattacgtgaataacgatatctttaaagacctgcccagcatcggcaagggcggtggccggggctataccgcgtatgaggaggagatcatcgccctggcgccggacgtgatcttttccgcctataacagcgaggcgctggaggaactggccagcaagaccggcatcccggtggtagccattacctatgacagcggcatgtttgatgagaagttgtttcaatctttggagctgatcggccagctgctgggcaagcaggagcgctgcgaccaactgaccgatgcgctaaaggccgcccagcaggatttaagcgcccgtacgcaggatattgcggatgcggataagcctacggcctattcgggcgcggtcaccttctcgggcgggcatggttttgaggggacttacgccaacttcccgccgtttacggccatcggcgctaaaaacgtggtggatgagaccgggctggacggctcgctgcagatcgaccttgaaaaggtgctggtgtgggatccggaggttatctttttggaccctggcaatatggacctggtaaacgagcagtacgacaagaaccccacctacttccaatcgctacaggcggtgcaaaatggcgaggtctattctatgatctcctacaataattacaccacgaatgtggaactggccgtagcggacgcctactatgccggaacggtgatgttcccggaacagtttgccgatatcgacattgagcaaaaggcggatgaactgtttgaactgtttttaggcaagcccatctacagcgatatgcaggcggcggggctgagttttggtaaaattacgattggggagtaacagttggataaggcggttgcgttgaacccgcaggggtataacgaatttattaaaaagaaagtattggtgctcatcgccttggcggtgttggcgctgggggtagcgctgctctccatcctggcgggctcttccgggctgacgttgggagaggtattcgcctcgctttttgggcaggggacggcaaagaccaacgccatcgtttggaacgtgcgcctgccacggatcgtgacggcgatggtggtgggcggcgccctggctatgagcgggtgcgtgatgcaaagcgtgctgcgcaatccgttggcctcggcttctaccttgggcgtatctcagggtgcggcttttggggctacggcggccatcattctgtttggcgcgggggtacaaaactccgcgtcggccgccagcgccatcagcatctccaacccctatctggtcaccctatgcgcctttggcgggggcattatctctacgttggtcgtgctggggttaagtcgcgtacggcggatctctccccagtccatggtgctggcgggcgtggcgcttagctcgctttttaccggcggcaccacgctgctacaatactttgcggacgatgtgcaggtcgcggcggtagtcttttggacttttggcgacctgggacgtaccagctggcaggagatcgccctgatcgcggggatctccctggcggcgggcctgtacttttttgccaaccgctggaattataacgccatggaagccgggccgcacaccgcccagtccctgggggtgaacgtgggggcggtgatgctggcgggcatgacggtcagctcccttgtggcctctacggcggtctcctttgtggggatcatcaactttgtaggtctggtggccccccacatggtgcgcaagtttgtggggaacgattaccgctttttgctgccggcctcgatgctgatgggcatggtgattctgctggtcagcgatctggcggggcggctggccgtggcgccggtaatcctccccatcggggcgatcacttccttcctgggcgcgccgctgtttttgtatatgatctttaaaggggtgcgatagcatgattaccgtacgcgacctgcactttggctatggcagccaaaaggtgctgcaggatatctcctttgacctttccaaaggggaatgcctggccgtgctgggcaacaatggcgcgggcaaatccacgctgatgaaatgcctgaaccgcatcctccacgcccagggaggcagcgtgctggcggaggggaaggatctattgaacctgccccgccgggagctggcccgccaggtggcctacgtggcccagaagggggagggcagccgggccacggtgtttgataccgtgctgctgggccgcaagccctacatcaagtggagcctggaggagggggattatgccatcgcccgggaggtgctgcaaaggatgcacctggaggattttgcgctgcgctatatcgacgagctcagcggcggcgagctgcagcgggtgatgctggcgcgggcgctgtgccagcagccagagctattgctgctggatgaacccaccagcagcctggaccctaagagccagtacgaagtaatggcattggtgcgcgccatcgcccggcagaacgatatcgcggtggtcatcgtcatccacgacctgaacctggcgctgcggtactgtgaccggttccttttccttaaggagaaccgcatctttgcctatgggggttacgaggttatgacgcccgaggtcatcggccaggtatacggtatgccggtggatatcgtgcagcataagggcgtgcgcaccgttatccccttgccttttgagggagaagcagtataaaataaagataagaggtaaaggagggatggggatgaccaagctcaagggaatgctgccctttctggcgggcatgctggccgtgttttacctgctgccgctattggtgcgggatacggggtcgggcatgtttgttttactgggactggtgccgctgtgctgttttgcgctggctctggcctatgggctgatgcggcccttttcgccgctgtacgcgctgttttgcgcgctgctttttctccccaccctgtggatattctttaacgaatcagcctgggtgtatattccggcctatggggccattgcgcttttaggcagcgggatcggcgcgctgatcgccaagggcctcaggcgcgtatcgtgatcgaccggataaaggcccgcggaatgtttccgcgggccttttagcatactttttctgggggatgccgggtttttatttggtgtacaaaaaaggcggcttttgcaggacggcttgacgtacaggcggcctttggctatgctggatatggaatggacaggaggacaggataatggcgataagaacgttacgcatggatgaagacccggtactgcgcaagccttgcaggcccattgcacaagtggatgagcgcatccgcaccctgctggaggatatgggggataccctgcgggcggcgggcaatggcgcggccatcgcggcctgccagatcggcgtattgcgccgggcggtggtgatcgactgggagggagagctgatccatctggtcaaccccgtcattctggaggccgagggcgagcaggagtgcctggaagggtgcctaagcttccctggacgctggggccggacgatacgcccgcaaagggtgcgggtgcaggcgctaaatgagcggggcgagccctttacgctggagggcgagggcttgctggcccagtgcttaagtcacgagctggaccatctggacggcatcgtctttacccagcgggtgacccactggctgagtgagaaggaactgcaaaacttataaaaaagtgcgtggcatagctacgcactttttgggttaccgggcgctgcctttaagggcgcgcaggcgcgctttatcttcgggcgttacccggtaggattctaatgccttttggacggccttgcgataggtaaaaccgtccaggtggcagctgggcgaagccagataatccagcgccgcctgcggaaattttgcgcagcactcggctactgtccaggcggcagccattttatagtaatacccggggtgctgtaccctatccagccgggccaatacttcatctgcgtattcagggaggataaagtggtgcagcatcagcacagcgccaaagcgcatggcgtattcctgcccgctttcaagctgctgcccggccagcgcccaatagggctgagggaaccggtgcgcatcctttaagctggtgcaaaagctgtcgcataccgaccagttatcgatcagcgggatgaacttgacgacccgttccagccgctgctcgggcggcattttggcctgggcgatgataaagccgtgcagcagcgtcagttcaaagcagccctccggcgcctgggctaaaaacccggcccagtcctgcgctcgggcgatctccttggccagcgcgcgtacctttggcagccgcacccccaggatccccgtcacgccgggcagcaatttgctggtaaaggcctgatagcccggctcggccatctgttgcaggcgcagcagagcctgttgattattcattgcgccacctcatttctctttgaacaggtaccgctcgatggccagcgcagcgccgtcctcatcctgggtgagggtgagggcgtccgccgcgagccgaaccgggtcgggcgcctgtcccatggctacgcccataccggcatagcgcagcatttcgatatcgttataatgatccccaatagccaggatggactggcgcccgatccccagccgcctggcaagcgcgtcgatcgccataggcttggaaacgccccgggcgccgacttcaagataggtatctttagagcgggaaacggccagcagctccgcctccgggcaggcttgtagctgggcggtcagccggtccagctgcgcgggaggcgccatgcacagcagtttatccggcccggcctgccgggcacgccactgcgccgcgagcgggacaaaggcgcgcagctccggctggaaccctacgatatccgcctcctgtttggcccaggggtcgaaccgctcacaaaaccagttttccccttcgtacacgctaaggtgcacgcccagcgcccggcaaagctgaacgactttggcgctggcccctgcatccaggaaggctaggcgttctaaacggccgcggtagaccagcagtgcgccgctaaagcagatcatgggctgatgcgcaaggcctagcatagaggcaaccgcgccaacgcctttggggctgcgggcggaaaccaagacgaagggaacctgttgcgcggcgcgcaagatggctgcgcgcgttcgctgcgaggcttggtggcgggagttcaggatcgtgccgtcgatatccgagcataccatttgaatggccggcatggaatagccctcctttatcctatcgcttctatcaaaaagcatagcataggagtggtttatcggcaagaaggcatgataaaaccaaatgcccgccctattgagggcgggcatttatcctaacggctttaatagtatttgggcttgtagctggatacggcgcccgcggcgtcccctgcacaggcgcagctgacgatttggaacaggaagaaccataggaaagtggcgatgatgccggtgatgatcagcgatttggccaggtccatatcgtctttggccacaaatatgcaccccaggacgatgcctagccccgggaacaggatggaaacgatatacaaccaggttaccgagccataggctgcagccttgggcacatcgggcgtgaccgagccggtgtaggtggtcagcggcaggtggcattccgggcagagctgcacgttggccgcgtagataccgccgcagtgtgggcagacctttttggcgccgcttgccgcggcgcttttaagcgaggtatggcacttaaagcattctgttgcgttgtcgctgttgagctcctgacatttgggacaggttttcataaatgatccccctttatgaaatgttgtgttagagcgcctgcaaaaagcccgccaggcgcgaggcgatacgggcgtggcccgcgtcgttggggtgcagcccatctgggcagtattgcgcctgaatgacgggtacgttgggttgtataccgcttaccgtatatagatccagtaccggcagcgcataatatcccgcaacctcctttataatcgccacataagccgacaagggcaggccgttaccggggctgggctgatcttctgaaagccgatgcagtggggtaagaaaaacgatggtagccttaggataccgctgaatcagcccttgcatgagcagatggcaggcgccataaaaggtggcaggcgttcggtcctcaaaccggcccaccggcgcgtcgccatgaccgtaatcgttggtgccgccaaaaaccaccaccagatccgcatccggcgccatttcggcataccgctctaaaaaggagggacccctttccggctggccggagtgttgcggggcgatgcgcgtaccgccgatgccgtagttgcgggcgcaggccaggcccaacgccgcttgaacccggttcaggtaaatattacaggtctgcgatgtgcccacaccttcggtaatgctgtcccctaagaaattagcttttatgccctgtagaatcataattttcctccaaaccagcacgatctttcctccattttaatgctttatgggggataaaaacaaggcatgtgcgcatttaatggccggcatggcggtcgttttatgggttggaccaaagacgaagcaaagcaaaaaaggttggaaccgccatggcggctccaacctttttttgagatatttttaagccggatagatcaatcgggcagccatcagcggcagcccatcctgcttttctcccaccacgtcggcaaagatgcggcaggcatccccctctttgatcttaacggccccatcgtaggtgatcgccagcgcttcgccatctgataaggtgaaggtaaagcgcatggggctaccaggggtcacctcaccgatggtcccctcgcagagaaagaccttgcccgccaacttttcgggggaggcggagagcttgggataatccatcttccaggcgcttttggtgtattcctccgcattgggcttgcggtacagccggtgggtgagccgggactgagaaccatcgcccatggtagcagttacctcgatattttgccagccgtaatcccttagctgtgccgtaaaggtgaagttgccgccgctgtcctgcgtcaggctacccgaaagcatcagcgggcaggtgatcaccgcgtccgggtcgcactggcccgaaacggtaaaggtctcctcttcggtgatctcgcttaagtcctcgcttaaggagagcgccacgggcatgcctggccgctcaatggtaatggcccgagtgatgggcaggtgatagggcgactgggccttgatggtgtgctcgctggtctgcccggcggtgagcggcactgtcacggtataacggccggtatcgtccagctgggcggatacgtcctccccgttgacccagagcttgctgcccggctccagctgcaggtccagcagcaccgccggggaggtggtggagacgctttcgccctcgggcgagatcaacaccagctcggtgggttctaccttaagcccctcgggggtgagcgtgtagctgcgcggctggcccgaaccctctaccgttacggtgatctcacaggagacctgttcgctctcgggccattgattgagcaattcgctctccttgatctcgaactgcgcgatgccgttttggatcacgccggtgcgctccactggggaaaggcgtacgctctcgccatcctggccgcggacggtgacgacctgcagcttttccccatcccgtgagatagcctcaatcttgggctggtactcggaaggatcaaccggcgccggggaggcagctacctgttgacgattcaccggggcgtcgtttgcccctagatagtgattgacccccgcgtacccggcgatccccgcggctacgacggccacagccgccaccgcgatggccatgccgcggcgcgcgctgcgcttgcgcgccgcccgctcctgccgggtctcgggcaggtcttggaagggatcctccgggatggtgacgatgggctcggccccggcgggcatgccgtgggacgcgcgtgcgggatcgcgcagcgggtcggccgcaatggctttatccggcttttgggcatgcgtctggggcgtttgagcatgtacggcacccgccgccggcccagccggttcggttacgctgccttgtactggcgattcctgtgcctgtatctgtaccggcggggcgtcctgcaagcggccggtgcggggcttaagcatgcagccgcagttggggcaaaagtagtaagaatccgggttttgcgcccggcagatagggcattgcatcttcatatcgactccttcgggatagattgcttctctttttttactttgcctctagtattgccccgtttgctgcggctaatgcccccaataaggggttctctgttttaaaaaaacgtgctacaatataaatcattgtaaaataggttcattatgcccagaatttagggaggctttttatgcaagtagaagagtattatgagcagatcgtatctgcacccaaaccccgccggggcgtgctgggcatgctcaaagcggggcagatcatcttcctggtgctgaccgtgatcacgttcgcggcgttttacctgttccccatcagcggcggcacagccggggcgatcctgggcttttcggtgccggtgatctgtttggcgctcagcttgctgtaccgctggcggcggcgcaagctgcttacggattatgagtatatcttttccaatggggatttggagatcgcccgggtgatcgccaacgccaagcgccgcaagctgatgacctgtgatgtggctaactttgagtccatgggcctcatcgccgatgaggagggcaagcgcctttccaatatgccggagctgcaaaagatcatcgccacgccggatggggttgccacccattacgcgtattttaaccgcaatggcgaaaagaccatgctgatgttctcgcccaacgagaagttattcggtatgattcagcagcaaaacaagcgcgcgcgcctgtaccaggggagatgagcaaaagatggtctatctggataacagcgccacgacccagcccttccccgaggtcgttgaggcggtaagggcggcgatgctggagcagtggatgaacccttcggcgctgtacgcgccggcggtggaggtgcgccgccagtttgaggacgcaaggcgggcggccgccggggccatgggggccagtggcgggcgggtcgtgctgaccgtgggcggaaccgatggggacaacctggccctgatcggcgcggccaaccggtataaccagcctggcagcctgctggtctcggcaatggagcacccggcggtgggggaaagcgcggcctttttaaagctgcggggctgggagatcgtgcccctgccggccactccggaggggttggtaacgcccgaaaccgtgggccaggcggcagatagcgcccctgcggaccggccggtgatcgtcacctgtatgcaggtgaataacgagaccggcgcgcggatggatatcgagggcattgcccggacggtgaaggccgcgcggccggacgccctggtccattgcgatggagtgcaaggctttttgcgaacgccgctgaagcttaaaaacgtggatctgtataccgtaagcgcccacaaggtgcacggccccaggggcgcgggcgccctgtttgtgcgggatggcgtagccttgcgcggggtgcaggccggtggcgggcaggagtatggcctgcgctcgggcactgaggatgtggccgcggcgttgggctttaaagccgcgctggcccgctggcaggaggaaggggcagcctggcgcgaggaattgagaaagatgaagctctacctgctggggcaactgctggccatcggcgatgtgcgggtgaacgggccggatccggcgggggatttttccgcgccccacatcctcaacctgtccttcgagggcgtgcgcgcccaggtgctgctgcacgcgctggagcagcggcaggtctatgtatccacgggctctgcctgcgcctcgcacggctcgcgcctctccgggacgctcaaggccatgggcgtgaccggcaagcgcgccgaaggggcaatacgcttgagcttatcgccgcttaataccttaggacagatggatgaggccgcggatgcgattaaagagatggtgctttccttgcgccaataccgcaggaggtaaatgataatggaacaattgattctcgtacgcttcggcgagatccacttaaaagggctgaaccgcccttattttgagcaccgcctggtgcgggagatgaagcgcaggctgtatgacgagccgcaggccgccgtggaaaagggagatgggcggtattacatccggggcgttcagaacctggatgcggtgatggagcgtatccgcaaggtgtttggcgtgcattcgctcagcccggccatcgcggtggaaaaggacatcgccgccatacgcgaccaggcggtggagatgatgcgggacaagcatcccaccacttttaaggtcaaggcgcgcagggcggataagcgcttccccatgacttcgcctgagatctgcgaggaggtaggcggctatatcctggaaaccctgccgggatggaaggtagatgtacaccaccccgaggtaacgttggaggtggaggtgcgcgaacaggcgtttttacactgcgagaccctgccggctgccggtggtatgccggtgggcaccaacgggcgggcctttttgctgctctccggcggtatcgacagcccggtggccggctatatggtggccaagcggggcgtggctatcgaggcggtgcactttttctcctatccttataccggcgagccggctaaggaaaaggtgctgacgctggccaagcttttatcggaatacgcgggcccggtgcgggtgcacgtggtgccctttaccaagatccagcaggagatctaccaaaagtgcccggaaggggagctgacggtgatcatgcgccggtttatgatgcgcattgcccaggggctggcccaaaggggcaagggcggggcgctggtcaccggcgagagtatcggccaggtggccagccagaccatggaggccctggctgccaccgatgcggtggtggacatgccggtgttccggccggtaatcggcatggacaagcaggagatcatggagatcgccatgaagatcggcacctacgagacctccatcctgccctacgaggattgctgcaccgtatttacaccacgccacccggtgacccggcctaagctggagcgcatcgaggcctcggaaaaggtgctggatattgagggcctggtgcaagaggcggtagacggtacggaagtggttacctttaacgcggccgggcgcggcctggacgagtagagtaaggagtggacggcgtgtatccgttattggcggcgatccccatttttgttgcagcgattttacttttggtgcttaaatggccggcctcaagggccatgccggcggcctttgtctcggcggcgctggtggcgtttttcggctggcagatggattggcagcatatcgcgggcgaatcgcttctgggcgtttttaaagcgctggagctgtttaccatcctgttcagcgcgctgctgatcatcaaccagatgcgcgcctcgggcgccatggcgtctatcaaccgggcctttggttcggtcacgcgggatccgcgtatccagtccatcattatcggcatgggcctgggcgcctttatcgagggcgcggcgggcttcggcatgccggctgcgctgggggcgccgctattggtgggcctgggcttcccgccgctggcggccgtggtggtggcgctgatgatgaacatcccctccatcattttcggcgcggtgggcacgcctacgctgatggtgatcaataccaccagcgacatcgccgttcgtgcggggctggatgcggctgcttacggcgcggctgtcacccaatggagcgcgtatttgtacgcgttgccggcggtgctgctgccctttatcgccatactggtattgacccgtacctatggtaaggagaaaaagtggcgggattttgtagaagtgctgccctttttgacgttttcggtcatctgctttatcgtgccctttttgctggcggccacctttatcggtgcggagctgccctcgatgattggcgcgctggtctgcctgccggcgatggtgctggcggcgcgcaagggatttttgatgcctaagcacgagtggcactttttgccggaggagcagtggccgggggattggaagagcgtgcacaaccaggctgacgccggttatacctatatgcagcagtggcgcgcctggatgccctacatcatcgtcatcctgtttctggccatctcccgcatcccggagttggggatcagcggctggctgcagcagtggaagatcaccatcccttccctggcggggatcgaggggaaggattataccgtggcgctggggtatctgcccgggctgctgccgatctttgccgtagcgctgatcactccgctgatgcataagatggaggcctggcaggtggggcacgcctggcgcaatacttttaagatgagcgttggaacgctgatcatgctgatcgccagctttgccatggtgcaggtgatgctgggaagcaacgtcaatgccagcgggatggactcgatgacctcggtgatcgccggggcgctagcccaggcatcgggcatggcttatccggtgatggcccccatgatcggcgtgctgggttcgttcgtctcctcctcgggcacggtatccaatacgttgtttagctctttgcaggtagaaacggccaccatgctgaacatgtcgcccacgctgatcgccgcgctgcaaaatgccggcgccatcgtaggggttccctttggcgtgcgtaccatcatcgctgcattagttacggtaggcatggtgggcaaggaagggacgctgatgcgccggtattatccgatgatgattgtcatcgcgcttgcaatcgggctgatcggctatctgctcatcgcctcgggatttgatccggtcccggctggatagtgcggggattgacggataggttataatagaatgaagagaataggggccgcctggaagcggctccttttagaagcggaaaggagggctgcgcgttgaatctatcccaaatgctggagcatttaaagggggacccggtttttatgcagaatgtgacggggtggcatatccagcccgcgcaggctgcgcgcaccctgcccttcccccaccgggtggcgcctgaattgcgcgccgcctacgaaaagcggggcatccgccagctttacacccaccagcgccaggcctttgacgcgctggatgcaggcaaaaatgtggtggtggtcacccccacggcctcgggcaagacgctgtgctacaacctgccggtgctaaacgccatcgcccgggatgagaatgcccgcgcgctctacctattccccaccaaggccctgtccagcgaccaggtctcggcggtgaccgagattgtagatgagctgggcaaggatattaaggcctttacctatgatggggataccagcgtatcggcccgggcggcggtgcggcaggcggcccatatcgtggtcaccaacccggatatgctacattcgggcatcatgccccaccacaccaaatgggtaaagctgtttgagaatctgcgctatatcgtcatcgacgaggtgcatacctacaggggggtgttcggcagtcacctttgcaacgtgctgcggcgtttaaagcgcatctgtgaattttacggttctcatccccagtttatctgctgctcggccaccatcgataaccccaaagaactggccgaaagcatctgccgcgtgcccatggagctagtggacgataacggcgccccgcggggggagcggcactttatcttttacaacccgccgctggtcaaccggcagctgggcgtgcgcaaaaatgccgtgatcgagacgcgcaagatcgccacagagctgatacgcaaccacatccagaccatcgtattcgcccgcagccgggtgaatgtagaggtgttgaccaactatttgggcgaagccgcgggcagtggagagaagatacgcggctaccggggcggctacctgcccagtgagcggcgcgccatcgagcggggactgcgcgcgggcgagattttgggcgtggtctccaccaacgcgctggagctgggcatcgacattggctcgctggaggccagcgtgctgtgcggctttcccggtaccatcgccagcacctggcagcaggccggacgggccggaaggcgcgctggggaaagcctgacgatcctggtggccacctccagccccttagaccaatacatcattcgccatccggagtacttttttaccgccagcccggagcaggcgcgcatcaatccggataatctgtatatcctgctgagccactttaagtgcgcagcttacgaactgccctttgtggatggggagacctttggcgccgataccgcccagccgctgctggagtttttgcaggatgaaaagatcctgcgccatgtgggcggccgctggcattggatgagcgaggagttcccggccagcgagatcagcctgcgcaccgcggtgagcgagaacttcgtggtggtcaatatcacaaatcccgagcaccccaaggtgatcggtgagatggacaagttcaccgtgcccatgctgctgcacgagcaggccatttacctgcaccagggccgccagtatcaggtggaaaagctggattgggagaaccgcaagggctatgtgcgtgaggtgaatgtggattattatactgacgccaatatgctgaccagcctgcgggtgctggacgtgtttcgggacggggagcgggcaggcatcccacgcttcagcggcgaggtgctggtctcggaaatcaccacgttgtttaaaaaattcaagctggatacccacgaaaacgtgggctggggaaaggtgcacctgccccagcaggatatgcataccacggcctattggctgacgctgccggcaaaggtgcgggaaaagtataccgttccgcagatcgaaaaggcgctgggcggcatcgccaacctgctgcgcaatattgcaccggtgcttttgatgtgcgatcctatggatatccgggtgcagatgcaggtacgcgggccctttaccgaggagccgaccctgttcctttacgataattacccgggcggcatgggctttgcagatcggctttacgaactgcacgaggagctgctgggccaggcgctgaagatgctggaaagctgcgagtgcgagagcggctgccccagctgcgtggggccggcgctggagaatggggaggacggcaagtacctgacccgcaaagtgctggaggcgatgctggcatgatctccaacctgcgcgcaaaactcaagctgatggccaaagaacagggccagccccttcgggatgaaacggctatcccgcaggatacgttgtccgcccgggctgagcaacaggccgggctgcgtcacgaggtcgcacgctatcccttggaatttaagcgcgggcgctgcgcagtgggcggctttttgcgggcggacccggaggcggccgcgctgctgggcggcccacaggaaggatttgatccccaaagggcgctgtttatcgataccgaaaccacggggttgcagggcagcggcgcgttggcttttctggtgggcttggggtattttgaacagaatgagttcgtcgtcgagcagtttctgatgcgggatctatgctatgaggctgacttgctggcggcttgcgggcagctatggatgaactttgatactttggttacctttaatggccgggcctttgactggccgctgctgcgcagccgcctgattatgaaccgtctgcgccagtatgataaggaattttaccagatggacctgctttatcccgcccgccgggtctggtcgctgcggctgcaaagctgccggctggtggcgctggagcgggatattctgggggaagagcgccagggcgatatcgatggggctgagatccccgggcggtactaccggtacctgcgcaccggggaggaagggctgctgagcgacatcgtgctgcataaccggctggacgtggccaccatgcccgcactggcaggggagctttgctgcctgcttagaaatcctgagacggccgggcacgtgcaggatatcaaatccctggggcgtatttaccaccgccagggagagctggcgctggcggaaaagctatacagcctatccggcgccatcgcctgccgggaactgggactgctctataaaaaagagggacggctggaagaggccgccgcggtatgggtgcagatggtgcaaaagggcctggggggcgtattcccccacgtggaactggccaaatatgcggaacatacgttaaaagattacgaggcggcctgcgattggacgcaaaaagccctgcgtttcccgctgttgggtgcgcagacacaggcggagcttcggcacaggctgcaccgcctgcagggcaagctggcgcgggagcgagagcaaaaggaggaagcgacatgagttttgtagggaacctttacgggcgctatgcctatttccgccatatcggcgggcggatggaacaggccaagaaattttatcttaagggtcttgaaaagggaatggataaaccgaagtacctgtccggctgcggcgtggccatgctgcggctgggagattttgaactggccaaggagatgttccaaaaaaccttggcccaccccaaaacgccggaggcccacaagaatgccaaccgtctaaacctggcggtgacgctttggaaactgggggagatcgacgaatcgctgcagttgttccatcagctggaagaggactatcccagtgctgctgtttacggtagtctggggtatgtgctgctggatatcggctgggaggaagaggcgctgcaatataacctcaagcgcctggaggaatacgatgagaccgatccggtcatgctggataccgtggggcagatctattaccgccggggcgagctggataaggccaaggaatacttctccgaagcggtgaagatcaagaataatctggtggattcactctattatctgggcatcctggagcagcgggatggcaatatccgccgggcgcgggctatgctctctcgcgcctcacgccagcacatctctaccctcaataccgtgacgcgggagatggtagaggaaaagtttaaggagctagacgagctgtacgacgcgctgtctcccgaggagaaggaggcacaggcgccgaaaagcgcacccaaggcacagacccatagcgacccgacgcaaaagctcaagttctaaagcggcgcccttgacaggcgccttgtgcagtgggtataataacttcgccggttattgccggtaagatgatgaatggaaatggggttagagcgtgcgcaaaactgcttaaagtgcggcgaggaagcggttcccataaagggcggggacagtctgtttgctgcacggactttatctgttaagcagaagattgccgcgccggtgaacccgctactttttaagcagtaggggcattttaccctttgtgtatggaaagggcctgcggaattttctgcaggccttttgtgttgcgcaaaaacgcgtgacgatgaaatttccacgcaaggagggatgcgcatggcgatgctgcagattagccgcctgacctttggctacgagggcggcgtagaaaatatttttgagaatgtgaacctgattttggataccacctggcgcttggggcttatcgggcgcaacggcaagggaaagaccacttttttaaagctgctgatgggcgagatggcctaccaggggcagatcgacgcaccggttctgtttgattacttcccgttcgaggtgcaggccgctccaaaccaggtggcgctagaggtcatgcgtcaggtgatcgccccttacgctaggatggagcgggagatgcaggcctgcctggaggatggcggcgagcaggcgatggaggcctatggggcgcttttgacccgctatatggcgctggatggctataccctaccggatacgctgcgggtcgaggctgccaagctaggggtaaagcttgaggcgctggagcgcccttggagtaccttgagccatggtgaacagatgaagctggagcttgcggctttgtttcaaaaaaagaaccgctttttgttgatcgacgagcccaccaaccacttagatgcggacgggcgggagaaggtagcccgctatttaaagggcaagacgggctttatcctggtttcgcacgaccggtactttttagaccagaccatcgaccacgtgctggtgctgggccgcaaggatatcgtactgcagcagggcaattattccaactggcagacggataaggccttgcaggatcaggcgcagttggcccgtaacgaaaaactaaaaaaagatatcggcgccttggccgcctcggcacggcgcacggcaggctggtccgatgcggtggagcgcagcaaatccggcgcggcggataagggatatgtggggcacagggcggccaagatgatgaagcgcgccaaagcgatcgaggcccggcgggaaaaggcgatagaggagaaaaagggcctgctgcaaaacttggatgaagcacaggcgcttaaagtgcaggtgctgcctacccggcgcagcgctttgctggaggtacgggatctggcgatcgactacggcggcggcccgctttttgaacccgtgagcttttgtgtgcgggaaggggagcgggtggccatccaagggggcaatggttcgggcaagtcctcgatactcaagctgcttttgggtgggcagatcccttacacgggctccgtacacgtggcaggcgatctggtcatcgccacggtgccgcaagaatccgagcttttgcagggcagcctgcgcgcgtacgcgcgggcaacacagatcgatgaaagcctttttttaacgatcttgcgtaaactggattttagccgtctgcaatttgataaggatatggcggatttcagcgccgggcaaaagaaaaaagtgctgctggcggccagtttggccaagcccgcgcacctgcttatctgggatgaacccctcaattatatcgatatcctcagtcgcagccagcttgaggaagcgatcctccgggaccggcccgctatggtatttgtggaacatgatctgctttttacccaaagggtagctactcatacggtaaggctgcgctaaagggcttgccgggcacctgtaaaggattaaccgcgtctttgccctccggcttcacccaactttttgcgcagatcctgcagataggtacgctgcattttgtgcagcggcataaagcaaaaggccaccgcccgcacaacagggtttttaaattgcagcgtctaggtaaagaccacctgcgtccccgtgccataggcggaaaaggtgccggcccagcggccggaaaaacggctgttttgcatatcaaaggcataaagacggcagggctcaaaatgtgtgatggtaaaataggtttccatacggccggatttctccacaaaggtggtatcgcttaagacacgcaactcgtcgatcccgctgcgccaggcataatcggtattatcggtcaccgcctgccataccgcctcgggaggtgagctgagaaaagctgaaatctgcgtgtggagcattctaccgcctgcctttaactaatattctttaccatcatagcacaattggcgtaatatcccaatatcctagcgcgtggtaaagcttggtaatctgtgctatactgcccatagtagatttaaggaaggcttgtttacccacaggggaggcgaatagcgcatgaaaaagatcgggcggggctgggtggccattttgcgctccagccgcgattatatcaggcgcgataaagagcagatacgcgaaaaaatctgcatgcgctgcagatcgtcagtattgtgtttagcttattgctggcagtttacaccgtactagcctactttttctttaaaaatccacagttgatggccttttattatgtttttttaggattgcaagtggtttttgattgcgtattgttgcgcacggtacgcaaaggtgtttccacccgatgggtgcaggggctttgcactacggccagtttattgatcgtagggttcgtcgttgcgatctcggtctttccttatcccacgcgcccggcgatcttttttccgccggtgctggtgggcatggcggcagtctttatcttttcatatgaacagctggttttactgctgacgggctatgctgcggtttttgcggcgttggtgctgctctttaaaacgccccaggccctggcctacgatatctggagcgtaattcccgcttatctgatcgctatggtgtgcgcgtacaatataaccagcctgcgccttggagatttccatagtcgcatgcgttggatgcagttgagcattattgataaaccgacggggttgctcaacaaagcagcctgtgaggaagcctgccgcgcctgcctggctgaggcgggcaggggtacccacgcgcttttggtgctggatatcgacgattttaagcaggtgaacgatacctatggccatcaggagggggaccgggtgttgcacagatttggtgcgctactgcaagagagcttccgcgaggacgacctgaccggacgaattggtggggacgaatttttggtgctgatgaaggatattgatgcgtacagcgctagggagcgggcggtagaaatagtggataagatcgcacggtcgctttctaatcacccggaactacgcacgacctgcagcgcagggctggcgatagcgccggagaatagtaaggattttgacgcggtgtttgtccgggcggatcaggcgttgtaccaggccaaacagcagggtaaaaaccggctgggtgtcctttagaacaggatattgcatcgataaaagcgcgcggcttggccgggcgctttttagatccagatataattttacttacgaatagatggtgaacatattgtaaatagtctttgtgccgcgatataatataaaaggatatgagggggagagcgtggcgcttccaatatttggttggcagcaagaccatagctgctggattggctgccgctgcagaattgaaaaagtgatgcgttgaaaagagggggaacgaatattggctacgggtttcttggtggtcatttatctggcctttatcagcctggggctgcctgaccccatgttgggcgcggcctggccgcttatgcaggtggattttggcgcgccgctggaggccgcgggcgctgtttccatggtgatctccggggggacgatcctctccagccttttaagcgggcggctgatcgcccgctttggcaacggacggctgacgctgtttagcgtaatgctcaccgccgcggcgctggtaggttttgcgctggccccctcgtttggatggctggtcgttttggcggtgccctatggactggggggcggcgcggtggatgcggcgctgaataattatgtggccgcccattacgaatcccgccacatgagctggctgcatgccttctggggcgtggggacgatgatcggccccatggcgctatcggcgctgatcgccggcgggctttcctggcgcagcggatactgggcggtggcgggcttccaaacgatgctggtattgatcctgatctttacgctgcccttatggggcaaggtggccaaactgaaccctaataagtttaccggcgaggcgggcgaagaaccaggagggcgggtgacgattccgcaggccatcaagataccgggcgtaaagcttgccatgctggcatttttgttttactgcggcgtggagaccacggtgatgctgtggggcgccagctacctgatgcagatgcgggggatcgatgccgctacggcggcgcagggctcggctgcatttttttccggcatcaccgccggacgcatcctctcgggctttttaacgatgaagctatccaacaaacgtctgatctggctgggggtagcgggtattatagcaggcgtggcgctgctgctgatccccggcggggcgggcctggccatggcgggctttttcatgctgggtctgggctgcgcgcccatcttcccctgcatgctgcatgaaacgccggtgcgctttggcattgccgcctcgcagactgtgatgggcatgcagacggccacggcctacaccggctctacgttgcttccgccgctgctgggggtgatcgcctcctgcgtttcgctgcagatcttcccctttgtgttgctggggtatgcgctggcgctgggcgtttgtacggcctgcgtcaaccgcaatctggcgcgtaagggcgcaggggcttaggcacttccatcgccaagtatggaaaaaatccccgccgtcggttgacaaacggcggggattgccatataataagctaacacgctagtgctgtagtgatttagaacgataaagtagcaggtgaaatgatggcaacctatcaaaagcagatccccggcggcgtgcaggactatctgcaggccgagtgttaccacaagcggcgggtggagcgcgctttgcgcgagacctttatgatgagcgggtatgacgaggtggagaccccttcgtttgagtattacgatgtttacagcgagagcaacgccctaaagcaggagcggatgatcaaattcttcgatccgaacgggcgcatcctggccctgcggccggactttaccatgccgattgcccgtctgtgcgctacgcgtatggagagggcggaactgccgttgcggctgtgttacgtgggcagcgcctttggcaacgatgcggacgcccagagccaacggcgcgagtttacccaggcgggcgtggagcttttgggcctgcccggggccaagggggatgccgaggtgatcgccctggccatcgtcgccatgaaggaggcgggcctgacggatttccagatcgacattgggcaggtagagtttttccgcgggttgatggatcaggtggggatgaacgagcgggacgccgagcagctgcgcgagtatgtggagcagaaaaacgagctggccatcgagctgatgctgaaaaactatcctatgggcggggagatcaaaagcgacctgcagcgcctgcctatgttgtatggcgggccggaggtgctggacgaggcccaggccatctcctcgcacccgcgctgtcgcgccgctatcgacaacctgcgcgaggtgtacgcgctgctggaggcctttggcctgagcgactatgtatctatcgatttaggcatggtgcaggctatcggctattataccggcgtgatcttcaagggcatgacgggggccttgggctatccgctgctcaccggtggccggtacgatcacctgctgcgggcctttgggcgggatctgcctgccaccgggtttgcgcttggggtcaaggagattttgctctcgctggatagccaaagcgcgctgcggccgcagcccggtgtgcaggtgctggtgggggcggacgccagctgcgtttcggccgcctatgcctatgcgcaaaagctgcggggcgagggtatacgcacggcattttgtctgggatgtctgccccagcaggtcgtctcgcaggcccgccagctgggcgtgcccaaagcagcttatgcggacgccaacggcgtgcggcagttgatcgaggtaaaggagggcgaggcgtgatgcaggatgtgatcaccattgcgctggccaagggccggctggctgaaaaggctattgcggtactggaaaaatgtgggatcgattgcagtcaggtcaaagatcccgggcgcaggctggtactgcgggatgaaacgggggcgtatcagttcattttggttaaacccagcgacgtgcccacctatgtcgatagcggcgtggcggatatcggcatcgccggtaaggataccctgatggaggagaaccgcccgctttacgagatgctggacctgggctttggccggtgtcgcctgtgcatcgccggctttccggatgcggcgcagcgccggggcatcacagtggccaaccgacgggtcgccaccaaataccccaacattgcccgcagtttctacgcggcccggggcgagaccatcgatattatcaagctcaatggctcggtggagctgggccccatcgtgggcctggccgacgagattttggatattgtagagagcggcaagaccttgaaggaaaacggtttggtcgtactggaggaggtctgcccggtatcggcgcatctggtggtcaaccgggtcagcctgaagaccaaggggaacaagatcaaggcgctgatcgcccaggtgcgcgcggcgctggaggaggaacaagcatgatcccaattatcgattggcaggcggcgccgcaggccgtaaaagagcggttgaccggccgctcacagttaaattttgacgccgtgcgcggcgtagttaatgaagtgctgagcaatatccgccagcgcggggacgaggcgcttttggagtacactgccaaatttgacggggtacagttcccggatggggcggccatgcgcattacgcaagaggagatcgaccaggcgtacgcccaggtggatgcggacatgctgcgacggctgcgggccgcgcgggacaatatccgcgccttccacgaaaaacagatgcaaaagacttggatggatatcggcccgggcaagaccctggggcagctggtgcggccgatcgccagcgtgggcgtttacgtgccgggcggcacggcggcctacccttcttcggtactgatgaatatcatgcccgccaaggtagcgggggtggagcggatcgtcatggtcacaccgccaggaaagaatggcaaggccaaccctctaagcgtggtctgcgctgccgaggccggggcaaatgaaatgatcaagatgggcggggcacaggctgtggccgcgctagctttcggtacggagagcatccaaaaggtggataagatcaccggcccgggcaatatttacgtggccaatgccaagcgggaagtgtacggttacgtgggcatcgatatgatcgccgggcccagcgaggtgatggtgatcgccgatgccagcgccaccccccgatacgtggcggcggaccttttgagccaggcggagcacgacgcgcttagcgccgtgattttggcgacggattctatggagatcgctcagggcgtggcgaaggagctggagcgccagctgtccaccctctcccgcaaggagatcgcgggcaagtccctttctacctatggtacgatcgtagtggtgccggatttgaaggctgcagccgccctggccaacgaggtagcgcccgagcatttggagctgtgcgtatccgcgccctttgagctgctggggcagatccgcaacgcgggggcgatctttctgggacattacacgcccgaacccgtgggggattattgggcgggccccaaccacgtgctgcccaccagcggcacggcgcggtttttctctccgctctcggttgaggatttcctcaaaaagagcagtgtgctatactattcaagagaagagctggcgtcctgctggcaggatatttcgcagtttgcccgaggcgaagggctagatgcccacgcccgcgcggtagagctgcgctttgaggaggaagaatagatggcgcgcacaggcgaggtggcccgtaaaacggcggaaacggagattgcgctgcgtctggagatcgatggagcgggcgcagcgaagattgataccggcgtaggttttttgaaccatatgttgaccttgctatccaaacacgggctgatggatctggacgtgtgctgcaagggagaccttgaggtggacgcccatcacaccgtggaggatatcggcctttgtttagggcaggcgctgcgccaggctgcgggggacaaaagaggcattgcgcgctacggcaccttttacgtgcctatggatgaggcgctggtgcgggtagcgctggatttttccggccggccattttttgtgctgcgcggagaattgccctatgcgctgctggggcagatggatacccagttggtagcggaatttttccgcgccgtggccatggaggcagggctgacgctgcacatcgatattttagcgggggagaacgcccaccacatggtagaaggggcgtttaaggcatttgggcgtgcgctgcgcgcagcgttgacgctagacgcgcgggagcagggtatcccctctaccaaggggagcctataaatcgtggagaagaaggaaaatatggtcatctatccggcaatcgatatgaaggacgggcgctgtgtgcgcttaaaacagggtgcggcggacgccgtgacggtttatggggacgaccccgtggcaatggcaaaaaagtgggccgatggaggggctaagtggctgcacgtggtggatctggacggcgcgtttgaaggcaaaagccgcaatgcggcgctgtttaaacagctggtcgccgcggcaaaaataccggtgcagaccgggggcggcatccgcacaatggcggatatcgcttatcgcattgaagaatgcggcatcgcccgggtgatcctgggtacggcggcgctggagaatccggggctggtggtggaggcggccaaacgctttccgggcaagatcgccgtgggcatcgacgccaaggacggctatgtggccgtgcggggctgggtggatgtgtctaagacgctggcggtagacctggcgcaaagaatggcgcgcgccggcgcctgtacggtgatttataccgatattagcaaagacggcatgatgcgcggccctaacgtagaagccacgggcgagatggtgcaaaagggcggcatgccggtgatcggctcgggcggggtctcctgcctggaggacgtcagggccctgaaggcggcgggctgcgcgggcgtgatcgtggggcaggccctgtactcgggcgcggtgaccttagaggaactgctggcgctgggagattaatatgggaaaggttttgcgccgcctggcgatattgctgctgctgatctcgctggcgctgggcgggatcgctatccctatggatcgggggcagtggctgtgcgccgcctggccctggtgtgacccgctgtacgtgatcgcggcggaatacgcggtgatcggcgggcgggaccgggcgatagacgaggaaaagctgacgatgagcctgcaaggcgagccggtgactgtgctgcgcgagcaggtgtgggtctttggcggtgccgcgccgcagacaaaggatttggaggagaataccaatggaaaataatatcctggaaaaagttaaatataaccaccacggtctggtgccggccatcgcgcaggatgtagagagcggccgggtactgatgatggcctggatgaacgaagaatccctcaagctgacgcttgagactcggcgggcgcattactttagccgcagccgcaaaaagctttggctaaagggggagacttccggtcatttccaagacgtagtagacatgtggttggattgcgacggggacactgtcctgatgcgcgtgcaccagactggggccgcctgccataacggcaccttcagctgttttgagcagcccatgctggagagcgaggaggagataggtggcgacagccgcgtgctccaggagctgtacggcgtgattgcggaccgccacaagaaccccaaggagagctcttataccaatttcctctttgaaaaagggatagataagatctgcaaaaaagtgggcgaggaggcagccgaaaccatcatcgcggcgaaaaaccgctctaaagacgaggtgacctatgaagtgagcgacctgatgtatcacctgatggtattgctggtggagcagggcgtcagcctgcaggatatttatcgggagctggcggatcggcgctagaaagcgccgccgctacatatttttaccgcgagcgcatatgcttttaaggagcgagaaagccccgcgccaaagggatgagcgcacaagcgcttatcctgcgggcagcggcggtttgcatgcgcgaagctgggtaaaaatatggcgaataagggattgacagacgctccgaactattatataattatcaagcatcaattcgttcgggagcatagctcagctgggagagcacttgccttacaagcaaggggtcacaggttcgagccctgttgttcccaccaatggcctggtagttcagttggttagaacgctagcctgtcacgctagaggtcgagggttcgagccccttccaggtcgccatatgcctcggtagctcagtcggtagagcaagggactgaaaatccctgtgtcggtggttcgattccactctgaggcaccatctttgcggtagtagctcaatggtagagtgccaccttgccatggtggatgttgcgagttcgagtctcgtctaccgctccaattccggcgctatagccaagtggtaaggcaaaggtctgcaaaaccttcattccccggttcgagtccgggtggcgcctccagcggacagtgtccgcacccaatatcgcaacttgcttttgcgggttgcgatatttttgtgcccgcaataaaggattcatttcgtaagactctgccacgtcgcagcaaactacgctgcacttgaaagccccgcttttagcggggcttttgcgtacgctccgttgctgctccttttccgcaaaaagtcacgcttgctccgcctactcgcttgcaagcgcactcgcaacggctccgctgcgctaccaactttttgcggtgtgcgcgcctacggcgcgattgattaaaaacaagcagttcaaatttggtaggtgtacctagcggcaagtggccgctcccgatatcgcaattcattttggtgggttgcgatatttttgtgcccgtaagtcaatattccatatcgtaagacattgccagcggcaagtggctgctctcaagttcgtaaaccgcttatgtggtttgcagaatgaatgattggtataatcatttaaaactaaaaagtttaccagcaagccggctgtacccgatgttaattgcttacaaaggttgcggtatttttatgtttaagagaggtaggggtacatttttttatcgatgcgtctaagctgcggggtagcacgtaaccgtcaacacatatacaggctgcacactttttatattttctaacaacattttttatatttgcagttgcgggtataggttattgcgcgaaaagatgaactgtcggatgcatttataaacggaatactggtttgattgcggaagaaatccaggaatgttacaatatactataagtatagctaaatatcgggcgtgttggacagacacttaaccgtggggcccatttgaggagataagcgatgcgagcagaaaacttagccgggttgctggatgcgatgacgcaaaccagcatctacgttatcgaggaaggaagccatcaattactatattttaaccggcgctgctgcgatacgggccggggaaaggctgcccttggggtgaagtgccacgaggtatggccggaggtttgcgccaactgcccgcttgatgcgctgggggataatccttccagccatattgtttgttacgacccgctgcttaaaaccacggttgacgttacggccaaccggattctatgggatgatacggtaccggccgtcgtggtgacggcaacgccgcataagctgaattttgaggaagaacaggggctgcaaaagattcagcagatgtacgcgcgcagtttattgacggtctttggcgagtgcattattgccaaccttacggctgactattatgtaaactgccaaaaggatatgctgtggaccgggataccggaggaaggaaactttagcgaagagaaccgaaagtacgcccggaaactgctgcacccggacgacctgcccctgtttaacgatgctttttcgcgcgaggcgatgattcggctctttggagagggaaagcggcagatcacccggcgcctgcgccggcgcacgcagaagggttggtggacctgatgggcggcgccgtggcggtggagagccagcccggcggcgggaccaccttttgggtggaactggagggcgagcgggcgcatgcggacggcaagcgtcacgcagagaagcaatatgagataaatttgcagctggaggatcagaaagccttccagggcagaaatttcctgatcgccgaagataatgcgatcaacgccgagatattgtgcgagctgctggcgatgcgcggggcaaaagcagatgtacagaccgacggcgtaaaagtagtgcgggccttcagccaagcgcagcccggcgtttacgatgcgatcttgatggacatccagatgccggagatgaatggatacgcggccacccgggccatccgcgagctggaccggccggattcggccgctatcccgatcatcgccatgacagccaacgcctttgcagaggatgttcaggcctctctggccgcggggatgaccgcgcacgtggccaaacccatcgacatgggggtactgcgggatacgctggccagggtgctgaattaacttttctgattatgcaaaagcgcatcgttagatgcgcttttgtttttgcgtggggccggctctagatgaggcacattacctgctgtagcgataagtattagccaggaataacttttatccaatttgcaaatttttcattttaccgttgtttcaaacctgatctatagtaaaataaggataaatagcgtatgatggttagggaatgcgaccacaagaggaaaggataaaaagatggattttttagaaatcttaaaagcggtctttttaggcattgtagaggggatcacggaatggctgccgatctccagcaccgggcatatgatcctggtggatgagtttatcaagctcaacgtcagccaggagtttatggatatgttcctggtcgtcatccagctgggagcgattttggctgtggtctgtctgtattttcataagctcaaccccttttcgccacgcaaatcggccaagcagaagcgggatactttctccctttggggcaaggtgctgattgcgaccatcccggcgggaatcatcggcgttttgtttgacgaccagctgcacgatcttttttataattacattacggtggcgattacgctgatcatttacggcgtggcgtttattctaatagaaaaccgcaaccgcaatcggcgtccgctgatccgaaattttcagcagatgacctggcaggcggcgttggtcatcggcatttttcagatactggcgctgattccgggcacatcccgctctggcgctacgatcgtaggggcgatgctgattggcacatcccgctatgtggcggcggaattcactttcttcctggcgattccggtgatgttcggcgccagcttcatcaagctgctgaaatttggcttcagctatacggggatggagatcggcatcctgctgaccggtatggtggtggccttcctggtatcggtgttggccatcaagttcctgatgggctacattaaaaagcatgattttaaggcttttggctggtaccgtatcgtgctgggcgtgatcgtgatcgcctacttcctgctggccaaatagcggctgtgaatataagcaccaggcgccccttaatggggcgcttttttatttcgataaatgtatacggttatataaggcggcagaaagtgtgttatgatttttatggtggacttggcctatggcgcaatacggatagcgggagcgataagatgaaaaagaaaaagccgggcgggggaatctacgcacagtttcaatctctgattttagcggccgcgctattattggcatttttatatgcgggaacgcggtggggggtggaagatgagatcgggccaaagctgatgcttttggtagtggtttcagcactcctctttagcgcaatcctcctggagagcatcattcacgagaccgggcattttatttttggcaaattgacagggtatcggttctgttcatttcgcgtgcagaattttatgtgggtcaaacaagacggaaagctccgcctaaaacggttatcgttagtgggtacgggcggccagtgcttgatggtgccgccggaaatgctagatggacggatgccctacaagctttactatctgggcggcgtgatagcggacctggtttgggcactggctttcttagcgctgtttttcgtgctggagccgccggccattgccgctgttatcttgttggtactatccttagcaggatgggtcaacgcgctgctcaatggcatcccctatatgtccgcacagctgccaaacgatgggtatgaataccgcgagctgagccgggataatagtgcgctgcggtatttatgggcgcagttgaaggtaaatcaattgcagaccgagggcgtacgcctcaaggatatgccgcctgaatggtttgttgtccagcctactgaaggaaaggcgaacacactggcgtctacaattgaggtatttgcctgcaaccgattgatggataggcatgcctttggggaggccagtgaacggatcgaccgcctcctgcaggaggatacgggtctggtgaacctgcatcgcaaccaattgctgtacgaccggatctattgcgagctgatcggccctaaccgcgtggagacgcttcaaaaacgagtgggacagcgggatgaaaaattcgacaaggctatgaaacggcatcttttcgtcctgcgaacggattatgcctacgcgttgctggcaaaaggggatgagacagcggcccaggggtttatggcggagtttgataaaagcgctcggttgcatccctatgccggcgatttggagagtgaacgcgagctgctcgccctcgcgcagcaaaagtataggcgagcgcggaccgctgacgggggtggaacagaggaaccgcgcagggcagatggttagcggttactatcacttacctgcggtatttgcctgcagcaactgaaactgatttttatgataagcgatcagtccctcatcccgaagcttggagagctctgccgacatggcgctgcggtcgacaaacagataatcggccagctcctgacggttaaagggaatggtgaaacgggcagccccctgacgcagggcgcaagcggagagaaagctgagcagtttttcgcgggttgaacgccgggagagatgctccagcttttgggtgagcgcgacatttttttgggcaagtatgccgaccagattgcggattaggcgggtatggaagccgcagacgctggggcagggcgatagcagattttgcgggttgaaaaagaggacatcgctgctctccgtggctaccgcgctgacctcgagtaggggcgcggcggcacaggcgaaggcctcgccaaataattcgcccggctgtacatcggccaatatcgcccgatttccccaaaaatcctccttcatgatatgcgcgctgcccgacaggatcagtccgacctgaaggggcggatcacccgcacgcaggatatagccgccgcgcgggaaatgcttggtatgcgcctccaggcaggcgagcagcttttcataatccttgggagcaatcccttttaaaaggggcgaatgggcaaaaacttctaaataagtttgcataaaatcctctctaatgttgtaaatacaacggaatatttgacttgcccttagtataatcaaatcgaaccgagaggtaaaggcaatcataaacttttgtggggaggattttgaaatgatccgtaaaatcatcgagatcgatcaggataaatgcaacggctgcggcgcatgcgcggcggcctgccatgagggcgccatcgccatggtggatggaaaggcgcagttgatgcgggacgattactgcgatgggctgggggattgcctgcccgcctgtccgactggggcgatcacctttgtagagcgggaggctgccgcttatgatgcggcggcggtacaggcggcccaggccgggcgccaggcagaaccgctgccctgcggctgcccgggtacgcaaagccgtgcccttaagcccgatgccgcgattcagacagagccagccgcccgcgcgcacgcggccagccgccttggccagtggccagtgcagatcaaattggccccggtaaacgcgccgtattttaaggatgcgaagctcttgatcgcggcggactgtacggcctatgcatacggtaacttccatgaggacttcatcgccgggcgagtgacgctgatcggctgccctaagctggacagcgtggactatgccgaaaagctgaccgagatcttgcggcataacgatattaaaagcgtaacggtggtacgcatggaggtaccctgctgcggcgggatcgaactggcggccaaacgcgcactgcaggaaagtggcaaaatgatcccctggcaggtggtgaccatcagctgtgatggacggatattggaacgcagctgatccatgcgcttgtaagccggcaaagaaggcctgtaacgggctgcctttgccggctttttgcgccgtatactatccttcgtgtaaatatgtttgaaaaataaccgcaagcagcgtataatagggctataaatccgattagtgattgtagaagtacgaaggaggatttccctatgccattagttaccacgaccgagatgttcaaaaaagcctatgagggcggttacgccatcggcgcttttaacgtgaacaatatggagattatccagggcatcgtcgaggcggccaagcaggaaaaggccccggtcatcctgcaggtatctgcgggcgcgcgcaagtatgccaagcacgtgtatctgaccaagctggtggaggcggcgatcattgatgcgccggagattcccatcgcgttgcatctggatcatggcgccgattttgagatctgcaaggcctgcattgacggtggtttctcctccgtgatgatcgacgggtctcaccatagctttgaagacaacatcgccgtgaccaagaaggtcgtggattacgcccatgagcggggcgtgacggttgagggcgagctgggccgtctggccggcgtggaagatgacgtaaaggtcgccgcggatgatgcgctgtataccgacccggccgaggtggaagagttcgtctcccgcacgggcgtggattcgctggccatcgccattggcaccagtcacggtgcgttcaagttcaaaggcgagccgcacctgcgctttgatatcctcgaagaggtttccaagcgtctgcctggcttccccatcgtgctgcacggggcttcctcggtcatccccgagtatgtggagatgatcaaccagtacggcggcaagattgacggcgcccagggcgtgcctgaggcgttgctgcgcaaggccgctaccatggcggtgtgcaagatcaatatcgacagcgacatccgcctgggcgtaacggcggcgctgcgtaagtacatggtcgagcatccggatcattttgatccccgccagtacctgaccccggcccgcgatgcggtgcgcgagagcgtgcggcataagatcgtagaggttctgggctgcaacaacaagatctaacagcctaaagccggccctgcagcaaagatggctggggcccgcgccttggttgtgcttgaacgttttaaaaggcgctgctccgcgttttcgtggggacagcgcctttttaacctttgggtggggaatcccaaagcgaaaggatcgagggggaggtagaatatggcacatttaagcgatatggagattgcccgccaggcgcagatgcggcctatagggcagatcgcggaaaagctgggccttaaagaggcggactgggaaccctatggccgctataaggccaaggtggacctgaagctgatcgataggatgcaagaacagcccgatggcaaactggtattggtgacggccatcaaccccacgcctgcaggcgaggggaagaccactgtcagcgtagggctgggcgatgcgctaagcggattgggcaagcgcacggccatcgccctgcgggagccttcgttagggccggtatttggcgttaagggaggagctgcgggcggcggctacgcccaggtggtgcctatggatgagctgaatctgcactttaccggggacttgcacgccattacggcggccaacaatctgttagccgccttgctggacaaccatatccagcagggcaacgcactggggatcgacccgcggcgggtgacctggaagcgttgtgtcgatatgaacgaccggcagctgcgccagatcgtttccggcctgggcgggcggatgcagggcatgccccgggaggacgggttccagatcacggtggctagtgaggtgatggcaatcttctgcctggcgcaggatttaaaggacttaaagaggagactggcggccatcgttgtgggttatacctacgggggcaaagccgttactgccggagatttaaaggcggagggcgctatgtgcgcactgctcaaagacgcgcttaaccccaacctggtgcagacgctggagcacacgccggtgctgattcacggtgggccctttgccaatatcgcccacggctgcaacagcgtgatcgccacccgcatggcgctgaaattggcggactatgtggtgaccgaggccggctttggcgccgacctgggcgcggagaagtttttagatatcaagtgccgcctgtccggactgcggccgcactgcgcggtgatcgtggctacggtgcgggcgctgaaatcccacggcggggtagccaaggacgcgctgaatgaggagaatatcccggcgctcaaggcgggcctgcccaacctgctgcggcacgtgcgcaatatcacgcaggtgtatcatctgccggcggtggtggcgctcaaccgcttccccaccgatacccaggcggaggtggacagcgtgctggaggcggtcaacgccctgggcgtaaaggctgtattgtgcgatgtatgggccaagggcggcgaaggcggcgaggcgctggcccaagaggtacttgcgctgtgtgagaagccccgccagcagttgcactttgcctatgaggatgccctctccttggaggaaaaggtggaggcggtggtacaaaaggtgtatggcggcgagggcgtggactttaccgccgcggccaagcgcgagcttaaaaaattggagcaggatggctttggcgcctgcccggtctgcgtagccaagacccagtattcctttagcgatgaccccaaaaagctgggggcgcccgagggcttccgcgtaacggtgcgcagcgcgaaggtcagcgcgggggcggggtttgtggtggtgctcaccggcgacatcatgaccatgccgggcctgcccaaagtaccggcggctgagcagatcgacgtagacgagcagggcgagatcgtcggcctgttttaaaactgaagttgaggaaaggaaaatagaatgacctttgacccgaaacttatggaatatgagcaggcgaattttgacggggatgattttagcgatcttaccttagatggatatcgttttacgggatgcagttttaaaggcgccaagttttcaacggtggagacgcatgcctgcactttcgtggactgtaactttgaatacgcgcatctcaacggctccctgcaccgcgccagcgcgtttatctcctgccgctttggcggggccagcctgtttggcgcggagatgatcggctgcaagggcacggcgtccagctttattaaggccaacacggcgggctgggtgatccgcgggggtaatttcagctatgcgctgctttccggggcgaagtttaaaaaggacgacttaagcaatatgaacttttcccatgcggatatgcaggactgcgacctgagctttgccaacctttccggctgcgacttaagctatgcgatgctacagggtgcttctctgatcggggcggacctgcggggagcggacatcaccgggacagaccttggacagtgccgtatgaagggcaccaagatcgacctccagcaggcggtgctgctggcccagcgcatgggcgccagcgtagaataagaacaacagggccggcagcttgccggccctgtttctacctatattttcccttaaatccccatcgcgtgcgcgtagccgaccagttggcgctggatgcagcgctgcccttccaggttgggatggatgccatcttcgcacagcagggtgcggtaatcgcctgcgtcaaaaaagcccttgcgtacgtccaacagatagcagccgttttcgagtgcgatctgttccaccacttgggagtaggcggcctgatgacggtggatatgctccacatcccccaaccatttgaggatgttttgcgcgcttaagccattacgggtaacaaactgcagataacgcctggaatcgatgggcggaagattcatcaccgcgggcttgactccacgctctttaaaagcggcgatcatatcctgataaatctttttaaactgctccagcggcgtaaagggcagatattcgccatccggatcggcagagatctggctccagtcataatcgcaatcgttgccgccatattccaacagcgccaggtcgtaatttaccccttgggataaagacttttgcagccgctcccagccttttgagatagttgcgccaaagcgggaaaagttttgcaggcccagtcccaggcactccgccgcggcctggataccgcccttggggaggatgacgtggcgtttgcgctccgaatcgtacaaaatacctttagaaatagaatcgccccatacggctacatttgtcatatgattcacctaccatgttttaaaaattatttaatatagtttataaaaccatattacacgatttttatattcctgtcaagccgcgctgcccttgcgtcctagtacgaaatatggtatgatatttcggaaaagggggaaacaggatttggattttgatacccttgcgcaatgggcccagcagctgaaagagcataaaaccgtagcctggtctcagctgccggatattgacctgtatatggaccaggtcatcacttatctggaacggcaaacggcgctgttgcgcgcgcaggatcaggataagatgatgacgccctcgatgatcaataattacgccaaaaatggtatcttaccacgccctcagggcaaaaagtacagccgggagcatttggcgctgctcatggcgatctcgatgatcaagcccatcatctccatggaggagatcgagcggctgctccggttttaccgcaccaaagaaaatgtggacggtatgttttctcagttctgcaagacgcaggacgaggtgctgctggaacagacggaccggtttgaacgctcgcttcaggcctgcacagaggcggaggactgcgaagcgctcattcacctggctttacagctggtactggaggccaatgcccggcgcatcatagccgagaagatattatcccttctgcccaaagagggcaaggaaacatccaaagcagataaaaaagccgataagtgagagagtgaaatagatgtcaaaggccgcaatcaataggattgcggcctttggctatttttattcgcttttgcgtagatgaattttattcttagtttaaagctgtaccgtaacggctgtgccggcggccaggctctgatgcacatcgattatgcgctggttgcgcgaaccacaaaaggtcaactccaggctgcgctgatcctggatgaagggcccatccaccaacacgtccaactcttttagtagggcaatctgacagggatcgcctttttctaacagctcctcaaagagatagccggtgtaacaccacaggttcagccccaaggcgcgtacgccctgggccagatggcaaagcgcctgcgcctggcaaaagggctcgccgccggaaaaggtaacgccgtccagcagcgggttggcagcgattttttgcagcagggcctgcgtatccatgaggatgccgccgtcaaaggcatgtgtttgcggattatggcagccagggcagcggtgcgggcagccctgcacaaagacggtggcccgcagccctggaccgtcgacgatggaatcctgggtgaagccgcttaaacgtaattgcaagatcagccccccatcccgtgcttgacgcgatcccgctcctcagcgcgcttggcgttgttgaaccggtccagcgtaccgaccagataaccggtaatgcggcggatgcgctcaaaaggtatgtcgccctcctcgcgcccgcagctggggcaggtatcgccgatgatgccgttatacccgcaaaccgggtcacggtccaccggatggttgatcgagccgtagccaacgcccgcatcgtgcatggcgcgcaccaccttctggaaggccgccaggttctgggtggggtcgccgtccagctccacataggtgatgtgtccggcgttggtcagctcgtggtagggcgcttccaggcggatcttgtcaaaggcgctgatggggtagtagaccggtatatggaagctgttggtatagtactcccggtcggtcaccccttcgaacacaccatacgcttcccggtccatccgcacaaaacggccgcttagaccctcggcaggggtggctaaaagggtgtaattcatctttgtacgcgcgctttcctcatccaaacgggcgcgcatgtgcccgacgatctccagccccaggttctgggcggtggcgctttggccgtgatgttggccggtcaggcatttcagggtctcggccaggccgataaagccgacagagagggtgccgtgccggagcacctcgcgcacctcatcctcccaatccagcttgtcgctgtccagccatacgccctgccccatgaggaagggatagttgtagacctttttgcgggcctggatctcaaagcgctcgttgagctgggcgatcactaaatcaatcttgcggtccagatcctcaaagaacagggagatgttgccgttggccttgatggccagccggggcaggttgatggaggtaaagctcaagttcccccggctgttggagatctcccgctccgggtcggccacgttgccgatcacccgggtgcggcagcccatgtaggcgatctcggtttcagggtgtccctctttatagtatttaaggttatagggcgcgtcctgaaaagagaagttggggaacaaccgcttggcgctgacccggcaggccagctcaaacaggtcgtaattcgggtcgccgggattataggaaatcccctctttaacgcgaaagatctggatagggaagatgggcgtttccccattacccaggccggcttccgtagccagcaatacgttacgcatgaccatgcgtccctcgggggaggtatccatcccgtaattgatggagctaaagggggtctgcgcaccggcacgagaatgcatggtatttaaattgtggataaaggcttccatagcctggtaggtggccttatcggtctcctgataggcgcgcttgtgggcaaaggcctgcgcgcgggcaatcagttgaggctcgaaccccttttgccttaacgtttcggcttccgcctgatggtattggacatcctccgccagggtggggcgtaagccctgggccgccagcgcctctatcagctcgcctgccagcgcgggcgcatcctcctgtccggccagcagctccagcgctttggctaggttatcccgatagcgcttgacataggtctttcctacgccctgccccagggcgtattcaaagtttaccacagactggccgccgtgctggtcgttctgattggactgaatggcgatgcaggccagcgcggagtagctggcgatatcgttgggctcgcgcagcacgccgtgcccggtggaaaagccgcccttgaacagcgcgctcaggtcgatctggcagcaggtggtcgtcagggtataaaaatccatgtcatggatatggatgtcgccgttttggtgggcctgcacgtgctggggattgagcacgaacatattgttgaactgcttggcgccctcagagccgtacttcagcatggtgcccatggcggtatccccgtcgatattggcgttttcccgcttgatatccgaatcccgggcagacttaaaggtgatatcctcgtaaacctgcatcaggcgggtattcatctcccgggcgcggctgcgctcggcccggtaaaggatataggctttggcggtgcgcacaaagccgcccgagatcagcacctgttcgaccacatcctgaatctgttcgacgctgggggaggcgccaatgctctcgtcctgctccaaaagcgtagcgacctgacgggccaactccgtggccgtttccattccctttgcgctgccggatgcctgaaaggctttgcagatcgcctgggcgatcttatccaggtcaaagggaacctgccgtccgtcgcgcttgatgatgctggtgatcatgatgagctgcctcctcctgtataaaagttcatataatacaatatattgtgttttaaaaagtaaatctccatatatattgtatattgcgactgaagtaacgtcaaggggaaaagggtatccattttaacggtataccgctataatggagatatcggccagaatataggccaggatggattaaaaattaagagggtgtcaaatgtgaaaaaaggcgcttttacctggtttggctatgtgctgcccttggcgcagcagctggaagccattgccaacgccgggtttgacgcggtcatgctctggtggggagattcgctggcggactactacggtaccccggagcagcgggcgcggatggtagagcgcagcggcctggctgtagacagcgtgcacctgccctatgagcaggtaaacgcactttggcaaaaggacaatggtgcgctggtggcggcctatctgggctggatcggggagtgcgcgcgctttggctacccgcgggtagtcctacatgccacaagcggcgataccccgccgccccaaagccgggaagggctggaagcctttgcctgcatcgccgccgaggggcagcgcctgggcgtggaggtagcggtggaaaacacccgctttctccggttgctgctggacgtaatgcacgcgccgggctgtgaaaccctgaaattttgcctggatacctcccacggccatttgcggggagataccgggctgctgatggaggcgctgggggctaaactgagctgtttgcacctgtccgataacgacgggcgggaggaccggcactggctgccggggaacggccggatcgactggcggcagatcgccagcctactggccggggcaggatataaagggtgcctgtcgctggaggtcgtcccacgggaagatgaaaagagcatggggccggaggcgttcatgcaaaaggcgtataggagattatctgcctttgaagaacgggtgttagcggccagggcagattaacgcatatttcctcctcatgccccatatccttgaataccatgggataatggggaaaggcggagattttgggtatgctcaaagtgatctcgcttaaaaaactattgctgtgcatgggctgcctgctgggcgcagcgctgctattatggggggcgctttatgggctgcaaaacatgcaccacgccttttttgcgcgggattttgcgcctgagcaggcggagatgtccagcacggaagggcccaaggtggattggcacctaaaggtggacctggatgcgcataccctggaggtatggcatgggggcgaatgcatcaaaacctacccggtatccggcggggcgcgggagagcccctcgcccatcggcacctttaaggtggtggataagggcaactggggcgagggctttggcggcgcctggctgggcatcaacgtgccctggggtaaatacggcatccacggcacggtagagccctggttcgtgggcaagagcaacgcctctcacggctgcatccgcatgaaaaatcaagatgtgcgcgagctttataaaatcgtcccctacggcgcgtgggtgacgatcaagcacgacaatccgccctttcggctgatgcgcaatggcgatgtaggaagcgacgtacaaaaggtacagctgatgctggaggatctaggctatcagcccggcgggacggatgggcggtttggcagctatctggaaaggaccgtgcgccagttccagaaggatcagcagatctatgcctccggaaaggtagacgaggaaacttatgcgcggttgaaaagctgtgtagatgcgatcggccaggatgcgcccgaataagggccaggagcgaaacgcggacgccagccctcaataggccggcgcttttcctgtacacaggttgttgtgcgctggtgcctgtttaagctgcacgccgcttgataggcgatgcgaactgctatccggattgggcagcattttgcatcctgtttatgcctttacaacccgcgaaaatctacgaagcataaagatagatggttcccgcttgggtgcaaacgcggtataataagtaggaaatgagccaggcgagtaatttaaagcagataaggagaggcttaaacatgagaaaagagaaccgggaagcggtaaacgaccgctttttacaggagctggacaagcataagatcatcgcgatcctgcgcggagtggaatctaaatacctgttggccactgtggaggcgctgtgtgagggcggcctgcggatgatagaagtagcactgccggatgctgagtatcatccggaacgctatgaggataccttaaaaggcatccgcgcgctgaaggagggctttggcgagcaggtgtatctgggcgcgggcaccgtggtgaccacccagcaggctagggaggcggcgcaaagcggcgcagggtacctcatcgccccgaattttgacccggaggtggtggcctgcgctattgaccttggctgcgtgcccctgccgggggtatttacgcccagcgagatcgtggcggccgtcaaggcgggggcgccggcggtcaaactctttcccgcgggcaacatggggccggattacctcaaggccatccgcgcgccgctgccggatctgaagatcatcgccgtgggcggcatcaagcccgagaatatggacagctatatgaaggcgggcgcggccggcatcggaatgggcggcgcgctatgcgacaggggcgccattcgcgcgggagattggggcaagctgcggcgcagcgcgcaggaactggtgcggatcctgaaagaaaacaattaaatcataacatgggggggataaaaatgaagatccggagcatggaactgttccaggtaccgccgcgctggctgtttttaaaggtcaccaccgatgaggggatctccggctggggcgagccggtggtagagggccgggccgatacagtcaaagccgcggtggaggagatgagcgattatctcctggggaaagagatccgtattgaggacatgtttcagaccctatatcggggcggattctaccggggcggaccgatcctgaccagcgccatctccggcatcgaacaggcgctgtgggatattaagggcaaggcgctgggcgtgccggtgtacgagctgatgggcggcccggtgcgccagcgcatgccggtatacgtctggatcggcggggacagggcctccaccgccgcgcaggatgccagagaaaaggtagcggcgggctacaaagcggtcaagatgaacggcaccgaggagatggcctttatcgacagttaccgcaaggtggatgaagctgtggcccgtatggccgccattcgcgaggcggtaggctatgagatcggcgtgggggtggatttccatggccgggtgcataagaccatggccaacatcctcatcaaagagctggagcccttccggcccatgtttatcgaggaacccgtgctgccagaaaataacgaggcgctggaggagatcaaacgggccagccgcatccccatcgccacgggcgagcggatgtacacccgctggggctttaagcagctgctggccagcggaaatgtggacatcatccagcccgacctgtgccatgccggcggcatctgggaggtgcgcaagattgcggccatggctgaggcttacgatatcgccgtagcgccccactgcccgttggggcctatcgcgctggcggcctcgctgcagctggacttttgcacgcccaacgcctttattcaggagcagagcctgggcatccactataaccaggggacggatatgctggattatctggcggacccgggcgttttcggctattcagatggcgccgtagccctgccccgtgccccggggctggggattgagatgaatgaggccaagatacgtgccgcggcccagcagggccaccgctggcgcaaccccgtatggcgtacggaggatggcgtggtagccgagtggtagaaatagagagaacagaaaaaccctctgtccgtagttggacagagggtttttgcgatctatgtgcgctgtacagcggcaggggccgtgctgccgcggaggatcagctttgcgcccaccagcagcttggtatactctcccgtcgggcggcggatctgctggaccaggcgctctacggcaaagcgccccatacgctgtttgtagatatgcaccgtgctcagcggcggctcggctacctggcaggcggcgatattgtcaaagccgataatggagatatcctgcggaatgcggtaacccgctgctttaaaggcacgcagtgcacccagcgcgatggtatcgttatccgcaaaaaaggcgccgggcaagcgcccctcccgggtggcaagcaaggcgctagcatcggcataggcgccctccagggtggggcgcagggtcagaatatccccaggatattctaccagtcccagcgcctgcatggcctgatgatacccgcggctgcgctggttaaaattggaaatgcccaggctactttgcaggtagccgatccgcgtgtgtcccagctcccgaagcgcatccacagccatataggcgccttgggcgttgtccatgaccaccgcgtcaaacagagtgtgttccagcgcgttatctacgacgacgcagggcacctgcagggttttgagcaggctgatctgatcgggcgcgaattccgtacccaacaggattactccatcggtatcgccgccattacaggcttcgatctcctcgggcagccgctcgcgcgtggcgctgcgcaccagcaggtcataccccatctgatgggccgcgttttctacgccctccatcacccgggcgataaaatcgccgttgcgctctaccagttctcctgcgttacggtaggcgataaagcgcaccagcccgctgcgttttttacgggcattgcgtctgggtggggtatagccgtattcctgtagcacctgccaaacgcgctggcgggtcgcctcccccacgccctccctgtcgttgagcaccagggataccgtagccggagacacgccggcgagcttggcgatctgacggatattcattgctttcatctcctctgctataaacatatgggtaaacgcccattatgtcaagtaaataatgatgatttgtttagttgtttaggcccggcgatgtaacgctattttcttgacgttgcaaaaagtacgatgctaatatgggtctaatagcggcgaatatatgctatttatgtttattaaacatctaatgatttatcaaacaaggaggatgatggttaaaatgaaaagattgctcaaccagcctgaggcttatgtaaccgagatgctggaggggatctacgctgcgcatccggaccaggtgacctgtgtgggcgatgacgtaaagtgcctggcgactacccacaaaaagccgggcaaggtcgcgatctgcaccggcggcggcagcggacacctgcccctgtttctgggttatgtgggcgatggactgctggatggctgctgcgtgggcgaggttttccagtcccccagctccatgcagattttagaaaccactaaacacatcgataacggtgcgggcgtgctgtacatctatggcaattattccggagatattctaaacttcgacatggcaaaagacatggccgagatggaggatatcgagatccgccaggtggtagccggggacgacgtagccagcgcaccgaaggagaaagcgcagattcgccgtggtgttgcgggcatctattacgtttacaagtgcgcgggcgccgcggccgatgagatgatgagcctggacgaggtggcccgggtggccgaaaaggtgtgcgccaacgtgcgcacgatgggcatggcgctttcgccctgcatcattccagaggtgggtaagcccagctttgagatcaccgagggcgagatggagatcggtatgggtatccacggcgaaccgggcatccaggtagagccgctcaagagcgccgacgagatcgtggacatcatgctgccgaagatcctggaggatctgccctatgagaatggcgacgaggtagccgtactggtcaacggcctgggcgctaccccgaaggaggacttgtacgtgatcttccgccgcatcagccaggcattaaaggaaaagggcatctccgtattccatgtggatgtgggcgagtacgctaccgccatggagatggccggcatgtccatcagcctgctcaagctggatgacgagctcaaacgcctggttgcccggccctgccatacgccgttcttcacccaggtacagctgtaatttggagagggaggaacctttgatgcagaaaatggataaagcgttgtttaccgcttttatcgtgcgggccagcgcgatcatggatgaaaaaaaggattacctgatcgaattggacgccaacctgggcgatggtgatctggggctgaccatgtctaaaggctttggcaaggctagggaatttgttgaagcggggtcggatgagccgctggccaagtttatcatgaaaacgggtatggtttttgcccagcatgtgccctctacgatgggcaccctggtggccagcgcgctgatgaaagcgggaaaaggcgcaaacggtcaggatgagctggacgtggccggagtggcggaatttgcggcggccctggcccagggtattatggagcgcggcaaggccaaggtgggcgagtgcacgattgtggattcgctctatcccgctggcgaggcgttccgtcaggcggctgcgcagggattggacctgccttcggctgcgcagaaggcctatgaggccgcgcaggccggcgtagaggcgactaaggatatggaaccctgttacggcaaagcggccgtatttgcggagaaatccaagggtgtggtcgatcagggcgccgttgtgggcatgttgattattgaggcgctgcgagatgcctgccaggaataaacgtaaagaatatatacgcgcatagttcgaacaaaaaagaggaaggactttgccaacgcccaataaggaagttttctatccgttaaaaaggcgtagcacctaaagggtgctacaccttttttatctttggaaactgtcaatacagtttctctgcttgttacgataagtgacattttacgatcttttacattcttgacgttctagctttcgcaataaagccacgacttcatttgcttttaacactttgcccatagcaacaaccttttcatcgacaataagggctggcatactcatagtaccgtattccattactttctgcatatccgtaatgtattccacctctacggaaagacccatatcctttattgccttttttgcgttttcatattgttcgtggcaggatttacagcctgcacccaataccttaacacagcaaattccgcccttagcttcagggcagcagtcatttgtgatttcttccgcctcacttgtcgggcagccactactgcaagcacaagcaggtgttttcttttcttcttcttttttctttccgaaattaaacaatgccataatgataacctcctaaaattaaacaattaaatattgtattgcgttgaagaaatagcctacaacgataataccgattgtacatattgcaacgaaaatgcctaatagcttcggtttaaccgccttacgaagcataatcattgacgggagagaaagggtagtcacgcccatcataaaggaaaggacaacgccgagcaaagccccctttacaagtaaggcttctgcaatcgggattgtgccgaaaatatccgcatacatcggaacacctgcgacagtagcaagcacaacgccaaacggattgttatccccaagcaccttgacaatgaaatcttcgggtatccagttgtgaataattgcgccgataccgacaccgattaacacataaggcgcaacctttttagctgttgaaatgacctgttcccaagcatatttcatacggtctttgaaatgcagttcttcctgcggaatatcaatagcgtgaccgtttcggatatattcttccacttgattttcaaggtgcagtttttcaatcagcgtaccgccgacaacagcaattaccaagccgagaacaacatacaaagcggcaactttccaaccgaatatgctcatcagtaaaacaagactaccgaggtcaaccattggcgaagaaatcaaaaaggaaaatgtaacgccaagcggcaaacccgcacttgtaaatccaataaacagcggaatagaggaacacgaacaaaatggcgttactgtaccaagtaatgcggcaatgatatttgcccataccccgtgaaacctgccaagtatcttttttgttctttcaggtggaaaatagctttgaatatacgaaataatcaaaatcaacacaccgagcagcaccataatttttatagtatcgtaaataaagaactgaatgctgccacctactctgcttatagtatctaaaccgcaggcattcaatatagttgatatgagcctactcagccaacccataccgaggacttcattttgaaaaaagtcccaaccagtttttaatgcttccataaaaagctccttttatatagttatattgaaatgtgtctatatatcggcggttttataagccgtgcggaaaagtaatctataaacttcctcacttttcacagcacgacttgtttttgtattcaacatctagtgttgtcaactgctccaaacattcctttgcctgcttcacacctttttttgaaatggaataatgcgtccattttccctctttgcgaccaacaacaatttcagcgtcacaaagtattttcatatgatgagaaagcgtgggctgtgttacattgatttcttccaacagcttgcaggcacatttttcgcccgaacgtagtagctttataattctaatacggttttcatcacaaaatgctttgaagatcgccgcagttcttttttcgtccatcgttcacagccacctcacatagaaaactgtctatgtgttattatatgcatcacatagaaaattgtcaatatgttctaaacttttaataaaaagacagtgtaataatcatttccaccttcacacactgtctttaattttgcttgctttttctaatgtccataactcgtatttcaataatgctttcaaattatttccttatgtggcgtcagccttaagtccttcctcttttttcatgctgtttttgacctttatgcctgcaaaccttacttaggccacccagctggaaaacccgggcaggattggcggatgatcagtggcgcatctagcatgatgctgcgaggcgtcgggtccttactctcgataagctctagcagcagctccatgcatttgctggtaatctcttccaccggcatgcgagtggtagagagggtaggcttggtaaagctgtccacctcgttatctccatggcagaggatgtccatctgctgggggacccgaatgcccgcctcgtccagtaccggcagggcgccagcggccatcaggtctgaaataaagaataccgcatccggcatctgcccggtgtgtagcagtgcctccatcgcgcggtggccgcccgccatggtcatctcatcgtttacgatatgctcgggcgctacagacagattcagccgtttggcctcatccaggaagtattgcaggcgggtagtgctgccaaaggcttcgggctggggcagcaccacggcaacgtgtttgcgcccgtgtgaggcaaatagctgggcggatacccggcccactgcctcgttatcgctgagtactgtactgaaacgctttgactggcgctggaacagtacgatgggcacttgagggtcgcgctgctccatctgttccagatcctgcacagaggcgttggcgatgatggccccgtcaaaggcgctggccacatcccaacagtgcagcttggcaagctccccactcatataaggctgtaccatcagttcgatctcccggctctgctctagcatagcctgttgtaggcccatcagcatccgtcccatggtcatcgcccgaatatccatgacgcaaaacagcgcgatcacataatccgggctgcgggaggaggccgagcgcagccgcctggccgagatattgggccggtagtgcagctgctgggccgctacgtttacccgctgccgggtcgcaaccgagatgcgcgcctgctcgccacggccggagagcaccaaagagacggtgctgggggataccccggctaattttgcaacgtcgtaaatactggccacggacatttctcctatcctaaaaggctatttataaaccccatgtatttaatattagtgtaatgcggggcgggggcatttgtcaatttacctttggctggcgaggagatttacaaaccctatgcaaccgctttactgtgcagaaaaatccgtctgtaaggggaataaaaactaagagaatcttaagaaattgataagctggacttaaaacctgggctctagaatggaacctgtttgaaagcccggagcctgtgggccccgttttgaagaaaggaacgaataaatggataagactgaaaaattaaaggttgcggttttgtttggcggctgctcatcggaatacgcgatttcgctacagtccgcatatgcggtattgcaacatctggatggagagcgctatctgccggtgcccatcggcatcacccggcagggacagtggatgcgctatgagggcggcattgaaaagatcccccgggatacctggctgcaggatccgctctgccacccggttgtggtgctcccggggcacgagaccggcgcactgatggagtgggggccggcggggcccagccaggtagctgtagatgtggcgctacccatgctgcacggcaaaaatggggaggacggcaccgtgcagggcttgctggagctggcgggcatcccctacgccgggtgcggcgtgctctccagcgccctggggatggataaggacctggcccatcgggtggccgcgcaaagcggcgtggcagtcccacgcggcgaggtcatcttgaaagaggacaggcccgaacactgggcgcgctctggccgcgcagtggggtatccgcttttttgtaaaccggcgcggggcggctcttccctggggattacacaggtagaaaaccccgcggcactcgcttctgccgtgcgggaggcgctggaacaggacgataaagtggtgctggaggcggcggtgccgggctttgaggtgggctgcgccatcctgggctggggcggtgcgctgacgatgggcgtggtggatgagatcgagctggaacagggttttttagactatggcgaaaagtaccatcgctctaccgccaaggtgcacacgcccgcccggctggatgcagacacggcccagcgcatccagaacacggcctcacaggtctaccgcgccctggattgccgcgggtttgcgcgggtagacctgtttttgacccccaagggggagatcgtctttaacgaggtgaacaccctgccggggatgacggcagccagccgcttccccaaaatgctggaggcggccggcatctcgttttccgaaatgctggaccgaatccttgcagaggcggtgcgcccatgagagaagaacagattccattgctggtcaacgcggcccatgcctatgcgggcaagcccatggacctggtagccgttgacgcggcgcatccggacatcctgctgtgccgcgcagcgcaacaggcgctaaacggcctgctggcggccatcggcggggtggggaagatcctgccggtgagcggataccgcccgcgcagcgagcaggaggcgatctataccgcctcgctacgggagaacgggcgggaatttacccggaagtatgtggcgctgcccggccacagcgagcatgaaacggggctggccatcgacctgggggagaataagccacctatcgattttatccgtcccgccttccccgatagcggtatttgtgggcaattcaaagcccgggcggcagaattcggctttatattgcgttatccggcggataaagaggcggtgaccggcatcgcccacgagccgtggcacttccgctatgtgggcccggagcacgcccaagcgatggcgcgagagggcctgacgctggaggaatatgtcgcccggctgctcaaaacggcgcgctagagcgccagaaggaggaaacgtgatggacgcaaaccaaaacgccccggcatcgcaaaaggaacgcctggccttttacggcgggccctggatgagctttttgccctacatcatctttatcgccctgatattggtgacgacctttcactttggttcgatatccgatggggcgctgtggctgcccgcctttatcgcgctgctgctcccctttttcctggcaaaggataaggggcgctacgccgccacgctgatctcgggcatggccagcagggaggcgatcaccccggtggtgtgctggctgtttgccggggtgttttcccgcatcctgcgggacagcggccttgctgcgggagtagccgggctggcggccggcgcgggcgtaggtggcgcgtggttttccgctatcgcctttatcgcctccgcgatattcgctaccgcctcgggcacggggtttggcaccattgccgccgggatgggtgtgctctatccggcggggctggcgttgggggcgcacccgggcatcctggcgggcgccattatttccggcgccgcctttggggataacctggcccctatatcggataccaccatctgttcggccacctcacagggggtggacgtgccgggcgtagtgcgctcgcggctcaaatacgcgctggtggccggcgcactgacgctggcggccattttcctggcctcggcttttctgcccggggggacgggtgatcccacggccacaagctacaacccgctgacgctgctgatgtttatcccggtgctgctcaccatctatctggcggctaagagcggggacatcgtcatcgccaccacggtagggatcgttgctggcgtggcagtggccctgggcgcggggctgatggagtttatccagatcgatgtggcgcagcccgccctgccggcgctgatcacggtatccggggaggggctggaccgcgccgtaggcggggtgctgcaatcgggcctcagcgggatgatccaggtctgcatcttggcgctgctgctctcgggggctacggccatcatgcgcgccggcggcggagaccgaaggctgctggccctcatcggcagagtcgccaagggtcccaggggtacggagctgaccatcagcctgatggtgatcgccctctcggcgctgatggggctaaacgccccggccatcctggccattggcgcatcttttgccctgccgctggcgaaaaagcagggcatcagtccctaccgcacggcaaatctgctggatgctcagtccaacaccctatgttattgcctgccctggacgccggccatggtctatacgcttggctttgcagcggataccgccacacctttgacggcagcgcaggtatccccattcgtgttttattcctttgccatgctggcggtgatgctggccagcattttcctggggatcggccggcaggacggcctggagcaaagttcgaaaggagcgaaaaaacgatggcccgcaaaaggctgacacagctattcccctttttactgccgctgcggcgctggcaaaaaaagcgctgcttttacctcaaaatgcggctggaccgcaaccgttacgccgcccaactggccaagacccgcctgccctacccggtatttgaggacgcctttaccgtgatcaaccctgagagcggatacgacatcgcctatcaatacaataaggcgcataacctgaagctggctgccgccaccatggacgggctggtgattgggccgggggagacttattctttttggatgctgtgccgctacgcagataaaaagacgccctataagccggggctaagcctggtagacggcaagatacgcggggtttacggcggcgggctctgccagctgagcgacctggtgctgtggctggtgctgcatacgccactgaccatcgtggaacgccatccccatacggtaaaggactttccagcgccaggcatgcccgagggggtggatgccaccgtgtccgaaggatggctcgacctcaaggtgcgcaacgatacggaacatagctaccagctgttgctggacttcccggatgagctgatccgcgggcgcatccagtgcagtgaaaagccgcagtatgattattgcctgcgcattgacggcccgcgctattttaccacacagggtaaggtctacgagcgggcagacgtgtaccgcgcccggctggacccgtctaccggagaagggctggaggagaagctgttgtataaaagctgcacccgcatcggctacccattgccggcgggcacggcggtggagcggcgggattaaaggtacggagggaaaggaaggtaaaaagttgccgtgcagcatctgttgctgcacggcaaaagtatagagagagtagtatgaaaacagaattataaagtaaacgtacttagcttagcgcaaacgttaagtgattctttctagtccgaattttagattaggcattcttgttttttacggcgccaatgataaacaatgcaggcaataccagcccgaggataagcgaaaatacggggaaactgctgccgcccactgcagtgagaatgcaacccgctacactaagtacggcaacgatgatgccccaggcaatgcaggtgttcgctttttcggtacgtttgcaattttttacgccgataatacctgctaccaactcggctacagcgctgaccaggctcaggatacccgctgcatacagcaggccagaagagatcatcccatcggaaatataggcgagcgcggcgatgccaagaatggcaatgatcgccatgatcagcgcaatcgctccaccgatgatcattaaaattcccgtcactttcagaaagccagaaccctttgctaccgtttgttccattgtaaacccctccacattaaatattaagataaacagcaagtgctgttacctacacatgaaattgtttagaaagctatttcgtaggcgaaatacttgtcagaatcgcttgaacatcagcatcttccaaggttagtttttggccgccgttttccagccaaatattgacctggaattgctcatccccatcttcggtccagagtaccgctatcggataatcactgcttttgccggtaaagccctcccaggtatacgcccccagggtaaaaggagaaatatcctcggtatcctcatatagatctttccaaggctccatcatagtcgtatctttgtcgtaataggtgatctgcaggccgggcttggtcaactgatcgaattcatcttgcgctcccttatagatggaaaagctatttggattggtatccccttcgtactcatccaaaagatcagacgcggtaaaagccatccaaccttcaggaacaagtgcgttaacgttaccagcatcaaatgtctcccctgaggtttgcgccgtccccgcgcctccgtttgaagcaggtgctgcggtacagccggcaaaaatgacggtggccaacattaaaactgacagtataacgaaaccttttttcatataatatggaacccctttttgcgtattttttccttaaagatatcatataaaaagatgccagcaggcctgcttaatgaaaagtttagcaaaagagcggtaagaaagcatagtacccatcgggtactttttagagaactttgtcggatagtgcataaaagcggcaggtatccaatggatacctgccgcttgaacacgctaaaagtagcatgattatctattgtacggtattaagctcatctaaacgattgctacggccaagcagatcgatataaagcattaactcttctttggtaccgacgcccagttttctgtaaatatttttattatgtttacgaacggtgttgatggagataaaagctaacgcggggatttcggctatttcatgcccgtcgatataaaaacgcatgatgtggcgctctgctggggttaacgtagtggttccagcgacaaattgatccatcatctctaggagttctttggaaaatggatccgatgcggacaccggtgtctgacgctgctgaagctctttttgcaacaagctggcagtgacggtttgtggcgcggcgtcaatgccgttataggttaaatccaccagctgcattaatagttccgccgtttgcacatcctcagggatatttatgatgcaaagctgagcgggaagttgcatgatatgattgcgatagctccaaccggctgtaaatcgttgcgcaatgttttgcaccagcatttttgtggctttagaactattgtaatcggtcaatattacaaaatggcctcgctcacaatcgtatacgttatcattcagggataactcttttaggcattcggcaatactggcaaacaatccgttagcgtagtcagcgcccatcagcatggcctgcaaatactcagaacgcgaaagtttgatcgtaacagccgcgaaacggcttccacttttgatggctaaggagatattccgtaaaaaagtaacgcggttataaacattggtgatgggattgtagacttcatttaaattttctactgtcgtaaggaagccgaaaatgccaatcgattgaaagaacagttccagcagttgatggggcatgaaaacctgctggatgaaaataggaatgatgctgaaaaccaaaagacaaatggccgcatgccgctgcgctttgcgtagcgttccacgaaagcgaaccgcaagccctgtggcgaataagatatagaaatatccggcgccataaagcgcatagatcatgataccatgagaataaatgtggctgctatcatagtagaatacccagttcaaaacaggattaagggctagtagaagcacgacgcccaaaatctccgggagcagaaatattgccaacaacgcttttccgattcgatgccgcagccccaacagcataatcatataccaagcgaacagacaagcggtgctggtatgggtaaaaagaaatatgtagttcaaaatatcccggaaaaaatagctgtaatccataacataagaattggctacagaactccaaatatcaaaaatagccgaaaccaattcggcgatgatgatatacattaacaatcgattagaggaactacgcatatccttttttgagagtattaggtataatgagaaagcactgatgattgctgcgcaaatatcgaaagaaacgttgtagatcacagctctattccaaccccttttgagcgataataatactctcaaagtagcattttctttattagagtataaaaaatgccggcgattgtcaagaaaaatggattctacacgattctacttttttagcaacgttaaaacgatacagcaaaggataaaggtctacgagcgggcagacgtgtaccgcgcccggctggacccgtctaccggagaagggctggaggaaaagctgctgtataaaagctgtaaccacgtcggataccatttgccagtaggcgaaggacgctgtattcatcgttgttacagggcctcgataaaatgacgggggtacatgttccaatattttttatatacaaaggtatcgttgccatcaaaattcagctgatacattctaaacgtcacgagaaaatttttaggctgccacagctcctcgtaggtatattgatagcgcatgcccagcgccttcatcacactgccgctgcggggattattaacgtcgtgcgtcgccgtgatgtagggcaggccgtcttttttcacccgttggaccacggctttgcccgcctcgcttacgatgccctgatgccaaaattctttgcgcaagccataaccgagatcgtgatgatcctgcgtgctgacgttgatatagccgatcgggatattgtcgctgttaaggcagatggcataccgatatcccgtgggctgcgtatagtccgggacgtatctttcctcaaataatacggctgcctcatctattgattttagcggataccacggcagataagtgtttacctctttatcgctgtagattgcaaataatgcggggaagtcctcccgcgtaaactttcggagaatcaggcgatctgtttccagcgtaggtgtgttcatgctttattccccctattcttcgatgatcgcatttaatgtatgtttcgcctgctccgcaaccaacgcgtttgaggcgttaacggtgatgagcgccttccataaggcccatccgcgcgccctatcaatagtccccgtatccaacccgcgcaaaaggtattttctgctgcgttcgccaaaaaaggtccaggccatggcataatcgcaggccggatcgccaatgcccatgatcccgaaatcaatcacaccgcaaaggctgccgttttgcactaaaagattacccggggccacatcgccgtggagccatacaggaggatgctcccaggttgtggcgacggcgcgcgcccacagcgcgcttaacttttcaaccggccaaatgtcccgttgcgcctgcagggcctcttcaacctggctgctataaacagatgggcttgcgccgcggaagaaattatgttcacccgcagcgggcgcaccggtcgtatctatgctttgcagctcttgtaaaaatgacgcaagctccatcgcaaagcctttagcatcggtaatattgtgcgcattggcggtttcgcctgcaatatagcggttgatggaccagggaaacggatactcatccgtgggaacgcccatggccaccgggctggaaataggcaaagacaggtgccgcgccaagaaggggagccactgtgcctctttttctacctgtgcgacatatgcgggcccgctgggcaggcggacagccatttcatcgcctagatgaaaggtcctgttatcgtgcccaccgtgcgccacggggcgaacttccagcgcgcgccattgagggaattgcgcatcaattaactttttgaccagttgcgttgtgatttcgaccatatagaaatgctccaaaagataattttcgataagagtattctaacataatgaggcgatagaagctatctcaatatataacagcaaagtttttgatggaggcataaccgggcgaaacctctagcgcaagaagggaaagtggcgagcggacaagaacgggtagatcacgtggttaaaaagcaaagcaatgcaaaagcggcatggcaatcagccataccgcttgaataaatgatgttcttgcaggggtacggccacttttggcaaagccccccaaaatccatattaaaagcctaattcacatcgatatacagcgcggtcatcgacgggatggtgactgagcctccaaagatggtctcataggtcttggacccggtcaagtacccatacatggtgataatatcatcctccaaaatacggccctcattcgccgtgcgctggtaggtaacataaacggtatcctcccagatggagtacttacccttggtcacgtttacgcgcagcactacggtgttgccactctccatgacctggacgacctcgccctggaacacggccttttgctgtttatagtcatcgggattccgcgcgatctcatcataggaaaaacgctggcaggcgccggtaaaggctgcctttttctcctcagctgtcagcgcgatcttctcggtacggatcaccccgccgcagaccgagcaggtcagcgcgcgctcgccatctgcctcaaaggtggcctcctgcgttacgatccactcgccctccgtatggggagcctggggaatttcttgagagagggtctctccacacgcggtgcatacgcccttttcaacgccagcagccgtacaggtagcttcggcctcggttatccattctgtgacctgatgaccggcaggagagccggtggttttgccgcaacgggtgcaggttttaggttcagtgcaggtggcctgcgcccaatcgtgccccaaaggctcgccctgcgtttcaccgcattccttacagacggcagcctctgtacaggtggcctgcgtccaatcgtgctggtgttggcacccagacatgaatagggctgccataaggagcacggctatcaacggcattaatttcttcaacatcatacccctcccattttctatattgaaatacatgcctttttatttacgatacagtaattttcgacaaataacaacgcacacacacatgagtgattaaaccgtgtgggatgtgaaacgataggccattaatacaacgtaaacaagctaaggagggaaacaaaatatctatatagaaaagtgcagagatgttagggcaaaaaagtagagacatgatcatgaaaaagccgcctgtagtggcggcctttagattgctataaacggatctttacgatctccccctgggcggtgttgatatccaccagctccaagcgcggataccgcttttttgcctgacggactactgcgagcaggcgttttgcctgctccggcgagattttaacgcccggctggtccgcgcgccccagggcgcgctgcagaatgccaagcgttacacggttgaccatcaggcgtgtgggcagggccaggtacagcgtgatggaaccgggcgatttaacgtagacgcgcatttattccaccacgacttccacgatatccccttgggcgctctccacctctaccaggcggccgatagcgcccttttccaccattaagaggatcttgtccagatcgatatttttaaacacctcgctgcccttaaaggaatcgtttccggcaaattccgggaagctcatgccgatctccagccccatcttgaccagctgcatgggcagattgacccgaaccttatcgcccttggcggaattgaccacgatgcgcagcatcagatcgtccagatttttgcgctcgccctccggcaccaatgcaacggttttagggggcgcggcccccagcagctcatccactgtgacgccaaagatcttggccagccggggcaaaagcataatgtccggacaggataggtcattctcccatttggaaacggcctggggcgatacccccagctgctcggctaactcgtcctgcgtcaggcacttggccttgcgcagcgctgcaatgtgcttgcccatcgaaaaatgatccatatactcgtctcctttgctttgttgccctcattgtacgggatcagccaaagcaaatgaagggctttgtggttgaataggccttagtctgcccaactaggggttgcaaatacgctcaaccatcggttgaaaacgcaaaaaggggagttaaacctcgatatcaaaccatttgcagctggcaaaccgggtatatacgcataccacgcggatggacatatccagcagtgaactcagccaggcgcccagcagccccgcgttgaagacgtagaccatcaacaccgatgcaagcggccggatgccggtaacgcacatcagcatgatgcgggccacataccgcgtatcccccgcgccgcgcaggcagcccgagatgacgacagaggaggtctgaaagggctggaacagcgccaccacgatcatgatctgcgagcccagggcaagaatctcaggatcggtattaaagatggccaccagcggctcgcgcaggatgatgagcacgcttagcagcgccagagaaaccaccatggcgatgcgctggctgatcttgccaaagactacggacagatcgggccgctttttgcccaaatattggcctaccagcgaagtgccggctacgccgatgccgtcggcaaaggtaaaggtgatattgagaaactgcatgcagatctggtgcgtggcaaaggcgatggtgcccaggtccgccacgatgcgggcgaacacgaaaaagccgatgcgcatggctacctgctccaacgcggcgttgccccccacgttgacgatggagcgcaggatatccggatgcaaccgccagctggcgcgtagcttcaggtgcaaaaaactgtcccggtgggcgatggagaggaggcttaaaaccaacccaaccgtaaagccaatggctgtggcgatagccgcgccggccacacccagccgggggaaaccccagttgccctcgatcaggaaaaagttgaataccacattgaccaggttggccacgatgttgacgaccatggtgatgcgggtattgccgatgccgcgctgggccgcgcaaatcgccatagtcagggcgttgatgggtaggacaagggccaaaatctgaaagtagacggtggcgtcggccagggtatcggcctgggcaccggccagcagcatcagcggctgggccgcccagatcgaggggatcatcaggatagctgcgatgattaagatcaacacgctggcgttgcgcagggtcagctgcgcctgctcccggcgcccctcgcccttgcggcgggctacgatggcggtgaccccggtgttgagggccataaatacagccaaaagcagcatgcgcggctgggtggtcaaccctaccgcggcgatggcctccgggcccagacggcccaccatcatggtatcgatcgagcctaccagggagaccatcagcatttccgccacgctgggcaaagcgatatgcagcagttcccggtaagcatctttggtgcccggcaggggccctaagcgccggtcgggcttgatcagggattcgaccgagaataaccggctgataacggtgggcatggctgaagatagcctccttttgtttatcttgctgggtgcgaaaaacggcacaggaaaagggcgccacaacgccccgtaattttaaataggtgagatgcgctgcgcggagaaaagagcgctaaaacgtttttgataaaaatattataacatacttgtagaactggggcaacgggagagggggacgggcgcggcaactaactgaatataaatagtttaggatagcggatataaatagctgtaacgcatcctatgttacgaacgcgcgagcgggcggtttccaaaccccggaaatggtgctgtgcggatacgcgccacctactctgctaatatccctccccgcgatggaaataaaaagcgccccgcaagcggggcgcttagaactagaaagagaatgttagaaaacggcttatttatacgagtatcctgagatgttgctgtccttgagcaccacatcgtggctgccgccctcgacgatgctggtggccgataccagggtgatgcgggcgttgcgctgcaactcggggatgctgagcacaccacagttgcacatggtggagcgcaccttgttcagcgacagggtaacgttatccttcaggctgccggcatagggcacataggaatctacgccctcttcaaaggagagctttttatccccgcccatatcgtagcgctgccagttgcgggcgcggttggagccttcgccccaatactccttcatatacgtgccattgaccatcacgcggttggtggggctctcgtcaaaccgggagaagtagcggcccagcatgataaagtccgcacccatggccagcgccagggtcatgtgatagtcgtaaacgatgccgccgtccgagcagacggggacgtacacgccggtttcctcaaagtactcgtcccgggccttgaccacctcgatcagcgccgtggcctggccgcggccaatgcccttttgctcgcgtgtgatgcagatggacccgccgccgatgcccaccttgacgaaatccgccccggccttggccagaaagaggaagccctctttatccaccacgttgcccgcgcctacctttacggtatcgccgtacttttgacggataaaatcaatggtgatcttctgccactcggtaaaaccttcggaagaatcgatgcacagcacgtccgcaccggcctcgaccagggcgggcacgcgctcggcaaagtcgcgggtgttgatgcccgcgcccaccatgtagcgcttatggctgtccaacagctcgttctcgttttccttatgggaggcatagtccttgcggaaaaccatgtacttaaggtgcccctgcttatccaccagcgggagagagttgagcttgtgctcccagatgatgtcgttggcggtcttgagcgaggtgttctcatccgcgcagatcagatcctcaaacttggtcataaactcggaaacttttacatccagcggcatgcggctgacccggtaatcccgggaggtgacgatgcccagcagcttgccattggcgctgccgtcctcggtgacggcgatggtggagtgcccggtgcgctgggtaagggccaacacgtcctccagggtctggtcgggcttgatattggaatcgctggtcacaaagccggctttatagctcttgacccgggcgaccatggccgcctcgtccgcaatggattgggaaccgtagataaaagaaaggccgccttcccgcgccagggcgatagccattttatcgtccgatacggcctgcataatggcagaaaccagcgggatgttcaggcggatgggagattgttcaccttttttaaacttgacaagcggcgtttggagattgacgttcgtcggtacacattcggtggaagaatagccgggaaccagcagatattcgccgaaagtgtgggagggttcatcgaaataataagccatctttctctctccttttacaaagcgttgggcgttaaaccagtacacagcctaaaagataggctgtgtacacacaatcaaaatcctgttaaaatgggctgccacaaaatactacatgtagctttttgggcaacttattaatttgttatattatcagggaaaggagcgtctgtcaaccgatttgaaagaaatttttgcatactttatcaccgtatgcaaaaagagattctatcttgacgggaggagggctttctgttaggataattgtaaactaataaattgattatagtttacaataggaggccgagatgaagaaattatccacccgtaccctaatcttatgcgctttttttgcggcgctgaccgcggtattttcgcagatcgccatcccactgcccatggtgcccatcaacctggccatgctggccgtattcatcgccgggggcgtattggggccttggggaggggcgcttagccaggtggtctacgtgctgctgggcgcggtggggctgccggtattctctcaattcaccggaggcttgggcattatcgtagggcctacggggggctacatcgcaggctatgtggtggccgctatgatcacggggttgacggtgcaaaagtggtgcagcccgctgccgctggcgttgggcatggcggcgggcctggccgcttgctatgcgctgggcacggcctggttcatggtggtcaccggcagtgcattgggcgcggcgctgatgacctgcgtggtgcccttcctgatcggagacgcggtcaagatcgccgtggcggccgcgctttcgccccggctgcggcgggagttggtgctgcgccatggctgagccctggccgctgcgccctcaccacgggttgtgcctgcgttttttcgcgggcaagggttatgacgcggcttttacccgcaatatggtgcgcgtccatgccagtctgaaaggcgatccgtcccagattgtgcggttgcattgcgggacggatctgctgtgcgcagcctgcccagagcgggtgggagagcgttgtacttcttccaagccagtagtatatgaccgcagagtgttacgtgcctgtggcttgcgggagggggaggagatgccctttggacaacttaccgatgcagtaaaacggcatatcctggcgccgggtaagctagagacggtttgcgcaggctgccagtggctacccctctgcacggagcgcaacggttaagaatctatattgcggcggttgctatagatttccccaaacggccactgtagtggtggggacggaggtttttcaaactctccgatgccgatgaaccaattaattctccagccgtttcgcttatgctccgccgcttgttttacctttctcttgcctctctctgacgagggagatggcgcacttttgggtacgccggagggagattctcttgagcgaaaacccatagattagcacgcggattaaatactgtcgttccgagcgcagcgagaaatctcatgatgaccaaaatgatatgcaatggattcttcactccggctttgcctccgttctgaatgacaacgcaccggacaataaagtatgggctaacgctcgtttaatggtcattcagggagaggccgtaaggccgagcgaagaatctcgtgcacggacgagcaagcggtgcttggcctgcggctacgtggtacaggcgaggccatcagagcgtaaggagattcctcacttgcgctcggaatgacagaattggaaacgataacccgcgtgggaaactggtttgaaataggcgcgccaaagcaatataaaaagccccattggcaactgccaatgaggcttttacgttaaaactattcggcctgttcgccggtctggccgataccggcggcgatacgccttaggctttcctccttgcccagcagaacgcacagctcgtaggcgccgcaaggcgttgccatcttcccggaaagggcgatgcgcagcggccagagcacctggccgtttttgcggccggtccgctccaccagcgccttgcaggcctgctgcacggtatcctcgttccagggttctaccgccatcagcaggggcatcagctcttttaacaccgtgtgggcgctctccaccgtggtcttcatctttttatggacatacagggcgttgtcgtaatccggcagctcgtttaaaaagtccaccatgccgggaatatcccgcagcacctcggtacggccctgcagcaggggatagagataatcaaagtcaaacttttccgggtccagcacctttaaaagccagggccgggccagggccgcgtattcctcgggcggcaggcggcgcatgtactcagcgttgaaccaggtcaacttggccatatcaaagatggcgggggatttgcttaaacccgtccagtcaaaggcctgctccaactccgcaagcgagaacatctcctggttggtaccagggttccagcccaatagcgcaatgtagttgacgatggcatcctttaaaaagccctcggcaagcagatcctcaaaagaaggatcgccatggcgcttggagagcttgcgcttttcgtccttcatcaccgggggcaggtgcacataggcgggcttttcccagccgaaggcatcgtagatcaaattatacttgggggtggaggagaggtactcgttgccccgtagcacgtgggtgatacccatgaggtgatcgtccaccacgttggcaaagttataggtgggcagcccgtcgctttttagcagcacgatgtcgtccagcgtggcgttctctacggtgatctcgccgtataccgcatcggtaaagctggtctccccctcggtgggggcgttaaagcggattacgtagggcgcgccgcttttcagctttttttccacctcttcgggactcaggtgtaaacagtgtttatcgtacttataggtttcacccttggcctgggcagccttgtgggcggcctccagctcttcggccgtgcaaaaacagtagtaggccgcgcccttttttaccagctcttcggcgtagcccttatagatcccgcggcgttggctctggatgtaggggccataatccccgcccacatccgggccctcatcataattcaaccccacctttttaagggtggaatagatcagctccaccgcgccttctacctcgcgctcctggtcggtatcctcgatgcgcaggataaacttaccgccgttctttttggcaaaaaggtaagtatatagtgccgaacgtagattgccaatatgcatatagcccgtggggctgggtgcgaatcgcgtgcgtacctgcatgtttttctttcctttcgattcgatggttttatttttctcaactaaagctggcccagcttggccgcagccatcatcagccccagcgccgtctttgaatcgggcagctggccgcgcataaccataccggcggcttcctttaagggcatgcgctgcggggcgatcatctcgccctcgtccgggtcgtcctccccctggcttaaatccgtggccaggtagatatacagccgttcatcgctgtaacctggagaggtgtacatttgggtgagcagctcaaagttcgctgcgcgcagcccggtttcctcgcgcagctcgcgatgggcgcaggctagcgggtctccttccccctcgtccagcttgcccgcggggatctccaacgtcacctcatccatgggggtgcgccactggcgaaccagcgtaacgcacatatcctcatccacagccaccacacaggcgccgccgggatggcgcacgacctcgcgcttggcgatgcggccgctatattggcgcacgctgtagcgctccagccgcagaatgcgtccggtaaaaagcacctccagcgtttcgggcaggcgctgctcgcgcagctgacttacgtcgtttgtcatagccgtgcctcctattttttaacagcctttttatagctgtccttcaggctgacggtggcgttaaacaccggattatccggcgtatacagcttgctgtcggcggtaaagtagccctggcgcatgaactggaaggtctcgcccgcgctggcctgcgccaaccggggctctaccttgcagccggacagcaccttgatcgaatctggattcatccgctgttcggccgtcagctcgttgccgtcctcatcctgggtctgctcgcccagcaggtaatcatatagccgtacggtggcttcgcggcaggtggcggcatccacccagtgcagcgtacctttgaccttgcgggcgctgccgggcaggccgctgcgggattccgggtcatacgtgcagcgcagctcgatcacgttgccggccgcgtcggtcacggcctcctcgcatttgataatgtaggcgtcctttaagcgcacctcgcgtcccggcgccaggcggaagaacttcttgggcgggtccatcataaagtcttcctgctcgatatacagctcccgggagaaggggacctcccgcgtgcccatctccgggtgcgccgggtgattctccaccgttaccatttcgctttccccttcggggtagttggtcagcacgactttcagcggccgcagcacggccatggcccggggagccgtatcgtttaaactgtcgcgcacgcagctttccaacatggcggcgtccaccagcgagttagccttggccacgcccacgcgggcgcagaactctcggatggcctggggcggatacccccggcgtcgcaggccgctcaaggtgggcatgcgcgggtcatcccagccttctaccgtgccggattccaccagcgcgcgcagatagcgcttgctcatcagcgtacgggtcaggttcagccgggcaaactcgatctgccgcgggggatgggggaaacctacctcctgcaccacccaatcgtacagcgggcggtgatcctcaaactccagcgagcacagcgaatgggtgaccccttcgatggcgtcctccagcggatgggcaaagtcgtacatcggatagatgcaccacttgtcccccgtgcggtggtgatgggcgcgcacgatgcggtagagcaccgggtcgcgcatgttgatattaggggaggccatatcgatcttggcgcgcagtacccgggagccatcgggatattggcccgcccgcatgccgcggaacagctctaggttctcttccacgctccggtcccgataggggctggggcggccgggcgccgttaaggtgccgcggtactcgcgcatctgctccggggtcaggtcgcacacataggccttcccttcgcgtatcagcttttcggcggcctcatacatccgctcaaaatagtctgaagcgtagcgcagctcgtcccactcaaagcccagccagtggatatcctccatgatggaatccacatactcggtatcctctttagagggattggtatcgtcaaaccgcaaaaaagtgcggccaccaaacttatccttcatcccaaagttgatgcagaccgccttggcgtggccgatatgcagatagccgttgggctcgggcggaaagcgggtgaggatgtgctcatgcttgcccgtctccaagtcctgggcgatgatctcctcgataaaattcaaactctcttttggggtgccgttttcttcacacataagggctcctctttcctataatatcttgatgagcatggtcatcgcttcgttaaactccacctcgaccacgccctctttttccaggcgcttgatcacgtcgctgaaccggcgaaagccgatctgcttttcgtcaaaatccggatacgcgctttgtatggccgccttgacgatggagggatttacccgctcaaagccctcgtctttataacggcggaagatctcggaaaaaacctgaataaaattctctttgttgatggtttccacctgcccagcctcgtcggcctcgctggtagcggcgcgtaccagcagcgagtactcgtcagacacggttttgatatggccaaagcgcttttccaggtggtgcagcagcttgccaaaggaggtctgcccgtagtttttctcgctgaaatccggccgcaggcgcagcagcgtatcctttagcgtgctggcgtatagcagcccgttctcatcggcctgctcgcttaagatgcggtcgatgatccgctgcagctcgtcaatgccgcccaggtgctcgatggcctgctcggccttggccttgggggtagatcgcgcgcgtttgccctccggctcggcgctgaccgccgcttccagaaacacaaactcgttgcaggcgttgatgaagatctgcgaggctacctccgaacgggagatgcccatgacgaatttgcccatggatttgagcttgcccaccaggggggtaaagtcgctatccccactgacgatgcagaagctgtcgatcaggggattggaaaaggccacctccagggcgtcgatcacaagctggatatccaggctgtttttttggctgacgccgtgctttaaagagggcacggcctggaaggtgttgctcagcaatacctccttgaggttttcgtaccgctcggagtagccgtagcacttgccaagcaatatatctccccggatcttgaccttttcgatgatgctgtttaacatggcgactttgccgcccgcgttttccatgtcaataaagacggcgaagttgcgtttatcttgtttactcatatttccttcttttctttagcgtacccgcggtatccacgggcctacttacattatatccagattatagcgggattcacccataaattcaaccaaaacggcgtattcatgcggatagcctgtccgatttcctgctttacagcgcctgcgcggcgggggtaaaatgggggaggaaaacggaaacggaggcgtatcggcaaatgagtgacgttaattttgaacgggtgtgctcgcccgagcagatcgcgctgctgggagacctggccaaacgcatctggaacgagcattttgtgcccatcatcggccaggcacaggtagattatatggtggaaaaatttcaatcgcccccggcaatgcgccggcagatggaaagcgagggttaccagtattattttatccgcgagggggagcaggttcggggctacaccgccttgcgcatggacgaggaccggctctttatctccaagctctacgtggaaaagccttatcgcggccgcgggctttcccgcaaggctttgaattttgcccaaggactttgccgggaaaagggctttcgtaaactctggcttacggtcaaccgccataatgtgcgcaccatcgccatttacgaaaggatgggtttttataaggtgcgcgagcaggcggccgacatcggaggcggctttataatggacgactacatcatggagaaggacctggattgaaccggtaaaataacctcttgaggccccgcacaagcggggcttttgcatgggcgtataactggacagactttgtggaaaacttgcaggaaaagcgatcaggagggattttgatgcaagtgacatttaaaggaacgcccatgacgctgataggccagccgttaaaaccgggggaacagatgcccggctttaccctgtgcggcccggagcttgagaaggtagaatccgaaatgttgacaggctcgaaggtttttctgagcgttccttcgctggataccggcgtgtgcgatgcacaggtgcgccggttcaatcaggccgctgcagcatttaggggcgtaacggtttatgccgtgagcatggatctgccctttgcccaggcgcgctggtgtggcgcagcgggggtagaacgggtgcgcgtcctgtcggattttagggagcgggagtttggcaaggctaccggtactttaattaaagagctaggacttttgacccgcgccgtgttcgtggtggacgggcagggaagattgacgcatgtggaatacgtgggcgaggtggcgcagcatccggattacgatgcggcgcttgctgccatccatgcgctgcagggatgaatcggggagaacacaggcctcgtccgattagggcggggtcttttttatgctttaaacgaacatcttgcgaaaaccgccctcctgggtatagcctacggcacggtaaaaggcgtgcgcatcggtgcgaaaagcgctggaaaccagaatggcactggtacaacctgatgcgatagcccaatgctccaaatggtcaagcagcttgcgccccacaccatggccttgggccttttgagttacaattacgttttcgattagcagaaaaggggcgtcgccatagcacagatccatgcagcggatgcccatggcgcttcccagtatctgcccatcctggcaagccacaagcaggcagtagtccggatgggcggccatattttctacctgcgcggcgagggccacagggtcgttatgccggccgatcagctcaaagatcagcgcttcaagcgctaaggcatccccaacctgggctgtgcgcaatacgatggacatatggtggacctcctttactggtatgaaacatggaaacaagaaaagcccggctaaaggccgggctgtacacaaccaattaaccttttgaggggatgaccatcaccgtggccgtaggcaactcctgctgcagatgggtgatgatgcccaaatcccgtttggcgtttttgggcgcttcgcccaccacgatggtggagacctcgttctttttcgcgtattctatcagggtctcaatcaccttttcactgcgcagcaccgtcatatccgcccccacctgcttgctgatctggaagaggaactccagcgcgtcgccctgcatcatgttccctaaaatattatcatcccggtgtaatacgtgcacgaccaaaagctctgcatccccggcctctttggccagccgcgcgccggttttgatcagccgttcgcaggtcttttgcttggttacgcacaccaaaacacgatttgccattttgacactccttgccttaggtatgaaacgaagaaaacgaagagccgcacccctccttagggagcgcgggttcgcgggtttactgataggcgattacgtgatcccccgagatctccagcaccagggcatccccgtccgcccaggcgggaagatccttctgcgcgtcaaagtaataggtccacaggcccgattcccgctgcacggtgagcttatgcatcagcagccgctcgtatagcaccacgccctcgttggagacgaagcgggcctccacggtagagtgcagccccttcatcatatcccggataaaacggcggtacaccttgagcgggcctaccttagttccatccagaaatacggcgatgaatgcgccgaccagccccagcacgatggaccacaactcgctttgcagaatgatcgccacgaccatgccgataaaaaagggcagacagcataaaacggtgatcagccgcatgcgcttgatctgctgtcctacggtatccaagtccccctggctatacatggattgctcccccttattgctttatgggctttttacacccaatatgccattgtttcattgcgcttaactgttgctattataccatgcgcccgcgaggttttcggctaattcataaaaaattaacaaacacatcctgcaaatcctgccatcaagcggcggctgcgggcataaaaaggcccgcttaagccttgcgctgtaagcgggcggccatactggtatgctgcttttaagctacttgcggtgttcagcggggataatctcgatccagtatccatccgcatcctcgataaagtagatgcccatgccggggttttcataacagatgcagcccatctctttatgttttttatgggcggcactgtaatcatccacaaccatggccaggtggctctcgttgtcccccagctcgtacccatcggtcttgtcccgcagccatgtcagctccagccggaagggggtgcccgccttatcggccaggtagacgatgataaaactgccgtccagcgcggttttacggcgcgcctctttcaggcccagcgcctcatcgtaaaaactcagcgccgcgtccaagtctttaacgttaatattaaagtgatcaaatacaaactccatacttcaagcctcctattttcaataaaccttcgcttacaaattgacctgtaattcatcgccccgcgcgccgatgcggaagatccgggtatgcgcggcgggcgctgcggcaataaaacgctgcacggcatccacctgctcgccaaagtgcatgggcaccagcactttgggctgcatgacccgcataaaatggcgggcgccggcctcaaagccgcggccctgccgggggtctaccggaaaaaaggcgatatccaacgcgctgatgctggatttgatcttttccatctcctgcaaaaaggcgcgcttggctgcgttgacctcggccacggtggattcctcctgccagtgccacaggttaaaatcccccgcgtggaagatgcgcacgccctccacctccacaaagaagctgaccccttcgtccgtactgccgaaggtggagaccatggcgcccgccacctgctgggcctgatagggctccaggcgcagggccttttcacgcactggcacatcgctggagaggatgtagtgcacccggtctcccaaaaacctgcgccatttaaagatcaccgaattataatgatccgcatggcgatggctgacaaagaccagcacctgcttgtccgcggggaagtcccgcgcggtcagcacgccgccggccatgccgcgccggccggtatccacgtgatccatgtaatagtcaaagaccagaaaatgctcgctcagctctacggcaaagccgctattatataaataagtaattttaacggtttgcaccggtatccctccaaaactgggcctggcccatcgtctgcgccaaaaggcagtacaaaaaggcagatgacaaaatctgcaccttccttatattctatatgaaaatgctgtcgaaagcaaaggttattcttacagttgggccgaggatcggggcaaaaccggcataaaatgcgctgaggggtgtaaattttttgtgaaggccgcgcaaagaaaatgatttaatcattctccagaccctcaaaggctgttttatgctatgatgataaaaaagcgtaggagaaggaacatggaaaagctgaccaaggcccaggcgcggcgctttttattatgccaccagggccttttggggccatatgtttttaaggggagcgaggggatcttgcgatacgtgcgccaggcgggctgtatccagtacgacccgctggatgtgtgcggcaaaaacgccgagctggtcttgcaggcgcgggtcaaagactttgaaaagccgcagttggacgcggcgctgtacaaagaccggcagttgatggacgagtacgataagaacatgtccatcataccgctggaggactggccccgctttgcccgtctgcgcgcggaacggggcgcgcggatgcacagcgcccaggcggtggaggcggtggaaaaacgggtgctggcccatttggaaaaggcggcgtatgcctgctccaaagacctgccctttacggagaaggtggactggtcctggcaggcgactgcgctctcccgggctgcgctggagaccctgtacacgcggggaaagctggtgatccaccacaaaaagaacgccgtaaagtactacgcgctggccgaaaaagtgctgcccgaggaaatcttaggccaggccgattccttcccggatgattttgcctttgaatgctggcgggtggagcggcgcattggcgcggtggggctgctgtgggcccggccaagcgacgcgtttttgggcatccatggcctgcggggcgagcgccggcacctgatttttgatgcgctgacggcgcaggggcgtatctgtccggttcaggtggagggcgtcgaggagcccctttacctggctgcggcacagctgcccgcgctgcacgcagcccgggaggaggggcatttgcgcccccgcacagaactgctggcgccgctggacaacctgctatgggacagggaactgatacgccggatttttgactttgattataaatgggaggtgtacaccccggtgcgggagcggcgctatggctattacgtgctgcccctgctgcacggcgagcggctgatcggccgggcggaattgcggcgggacgcgaaaaatgggatactgcatgtgctggggctgtggtatgaaaaggacctgcccgccgcgcgcatcccccaccgggcggtagaagcctgcctggagcgccttgcccgctttaacggctgcggggcggtggccttggcgaaggatggaggatttgctgagaagcaaatatgaaatccgccccgccgggcaggaaaagcccgctgtcgtgcagaatatcaacaaaacctatgtataaacgcccgtgggctttacgcgccgcgggcaagcctaaaggcagaaagggagttcaattattatgcgagcgatcatcaccgttatcggcaacgatactgtaggcatcatctccgccgtcagcgcggagctggccgcctgcggggccaacattctggatatcagccagaccaccttgcaggagtactttgccatgatgatgctggtggacctgtccggcgccagcgagccttttgccaagatcgagcagcggctgcaggcctgcggcgcggataaaaacgtggtggtgcacatgcagcacgaggacatcttcaacgccatgcaccgcatatagggaggctttaaggacatgccattatacagccatcaggaaatattacagaccatccgcatggtggatcagcagaatttagatatccgcaccatcaccatggggctttcgcttaaagactgcgcgcatcccgatatcaaagaggcctgccgcaggatctacgataagatctcctaccgggccgagcatctggtggaggtaggcgaggcgctggcgctggaatacggggtgccggtggtcaacacccgcgtggcggtcacgcccatctcgggcattgccgcctgcacgggggaaaaggactatctgccctttgccaaggcgctggacgcggcggcggccaacgtgggcatcaactttatcggcggctttacggccctggtgcataagggctgcacccccagcgacgaggtgctgatcgcctcgctgccccaggcactggcccagaccgagcgggtatgcgcctcggtcaacctggcttccacccgcgcgggcatcaacatggatgcggtggcgcagatggggcgggtcatcaaacaggcggctgagctgacaaaagatgcgggaggcatggcctgcgccaagctggtggtatttgccaacgccgtggaggacaatccctttatggccggcgccttccatggcgagggcgaggcggactgcgtgatcaacgtgggcgtctccggcccgggcgtggtcaaatgcgcgctggagggcgtgcgcggccagccctttgacgaggtggctgagaccattaagcgcacggcctttaagatcacgcgggtgggtcagctcatcgcccgggaggcggccaggcgcctggacgcccagttcggcgtggtggatctgtcgcttgcgcccaccccggcggtgggggattcggtagcccgcattttagaggagatgggcctggaggtgaccggcgcgcccggcaccacggcggcgttggcactgctcaacgacgcggtgaaaaaaggcggcgtgatggcctcttcccatgtgggcgggctctcgggcgcgtttatcccggtcagcgaggacgaggggatgatcgccgcggcccagaagggcgcgctgagcattgaaaagctggaggccatgacctgcgtatgctcggtagggctggacatgatcgccgtgccgggcgatacgccggcccagacgctaagcggcattatcgcagacgagatggccatcgggatggtcaaccaaaagaccacggcggtgcgtatcatcccggcggtgggcaaaaaagtaggggatatggtagagttcggcggcctgctgggcagcgcaccggtgatgccggtaaacccttacggcgcggtggagtttatcgcccggggcggacgaatccccgcaccgctgcatagtttgcgcaactaattgataggatatggaggagaaccggtactttacccgggcgcgcaggtggatcacccgccttgccgcctggcgatggaggacgaagatgagcaagaataaagagggcgcactgcccttccgggcggatatgcccaaaaacacccagtggcagctggaggatatctatgccgacaatgcggcctgggaggcggattttgaaaagctcaaggccctgctgccggaggtggccgggtttgcgggcaagctgggggagaacgcggagtttttgcggatgggcctggataagctgatggaggccaacctgctgaccgagcggctgtacgtttacgcccgcatgcgccgggatgaggacaatacccaggagctttaccaggccatggccgaccgggcggcgcagctggcggtgcagctggatgcggatagcgcctatttcaccccggaggtgttgaatatcccctgggtcgagcaggcggtggaaaaggacgaggccggccttgcgctctaccggcagtatctgcgcaatatcctgcgggtcaaggcgcataccctgccggcgggggaggaaaggctgctggccatggcgggggatatggcaggcgcctgcgacaatatctttaccatgatcaacaacgcggacatccgcttcccccaggtgcccgacggcagcggcggggaggtagaactgacccacggccgctacgggcagttgatggaatcgcccgaccgcgaggtgcgcaaagccgcttacgaggcgctgtacgatacctatggcaaacagatcaacaccctggcggccacctatgcgggcagcgttaaaaaggataacttttttgctggggcaaggggctatgcctccgcgctggaagcggcgctggatgcaaacgcggtgccggtcagggtgtatgacgcgctggtggacgccatccataaccatttggacgggctgcaccggtatatggacctgcgcgcccgggtactgggcatacgggatttgaagatgtacgacgtttacgtgcctatcgtgccggaggcggatatgcgctttacctgggaggaggccaagcagatcgtcaccgaggcgctgagcgtgctaggcgcggattatgccgccatggtgcaaaaggcgctggatgagcgctgggtggacgtgtacgagaaccggggcaagaccagcggcgcctattcttggggggtatacggcagccatccctttgtgctgatgaatttccagggcacggtggaccacgtgtttaccctggcgcacgagctggggcacgccatgcacagccattattccaacgaggcgctgccctatgtggacgcgggctactccatcatggtggccgaggtggcctctacggttaacgagcagctgttgctgcacgaatttttacggcgtacgcaggataaggccaagcgggcttacctgctcaactatgccttagagcaggtgcgcggcacggtctaccggcaggtgatgttcgccgagtttgagcgggagacccaccgcatggcgcaggaaggccagccgctgaccgctgagagcctgggccagcagtacggcgggctgaaccggcagtattacggcccgcggatggaaaccgatgagcgcatctccaccgagtgggcgcgtatcccccatttttacgatgcattttatgtttatcagtatgccacaggctattccagcgccgtcaagctggcggaggatatcttaagtggcgacggcgaggcggtgcggcgctaccgggccttcctgcgctcgggcggcagcgattatcccatccgcctgctgcaaaatgctggggtggacctgaccggcccggagcctgtggcccgctgcctggaatatttcagccatactttggcgcaactggaggccctgctctaagcgcagccttgcgagaaaggggcaataaaggaggttaccctggcgatgatggaaggttataacgcggcaaaggcccaggcctttatcgtggagaagatgaaagaatccggccggtaccgggatgaggagctgccctttgtggaaaaactggtgggcgcggccattgaggccgaccaggcctttatggcgcaaagcggtgtgctggatggagaatattacgatgaggacgacgcctttgagtacatcgtagaccatgtagttgaggcgctggacgccgacgagggcgcggaattggacgtggccgaggcggtggaactttatatggattataacgacgcctttttgcaggagaacgacctggtggattgggaataggcgccaagcgttttaacaagaccgccgaagcttcggcggtcttgttattttctgggcaagggaggacattaccgagaactgtcgaaatattacatgtaatattaccaaaacaagtctatttgctttccggtataaagtcagcgtcattcaaagagagggactatttgaaaacgacggggttattctcttctttatctatatccacacttttatttgcaatggccgtagggggattttatgcatgaaggggaagtaaaaagcgcgtggcggtaaaaaagaaaggggatttttatgcgagggaaagttggaaagggattgagcggtgtattagccttggcgctgtgcatggggatgacagcgtgtgcagtaggggcggatgccccggcgcagacctcatccccacagccgatgcagcaagtggaggccacgccgcagccaacggcacaggctgcgccgacgccggcaaagttcagctcggcggcggtcatggagcagctggatgtaaaaaaatatatttataccagcatgaattcaaactttgcggccttggccatcaccaatcattccgagtttgtgattgacatcgacgccagcgcgaaactgacaaagggcggcacgccccagggtgccgaacagggcatggcctttaacgtagagcccgaacagactgcggtggtgcgctttgtaaccgaagctgagttcgatgaatttgagtacgctttatccatatcccaggtaagggtggatgaatactatatgggttatacctcccatattgattacgatgtaacctcggacgggaaaacggccacggtggtgctcgccaatactggagacaggaacgccatggccgattgcaccgtgctcttttttaagggggatacgcttgtcgatatcggacaagttggcgctgatttgcagcccggggatgaagcaacccaatttgtatccgcctttcatgacaaaagctttgacaccgtgcaggcttatgttagcgccataaccctggattagttttgtcagatggctcacaaaacggcttccctaccagcacctccagatcgatggtgatctgagggagcgcttccggggctatacgttgcgcggaacccgaaaaggagagcggcgtcatccggagaaaatcggcagcttgcgggggcgaaaggggacgggtatagcgcagacgcgcccggtgtagcgtttgcagactctcttcaaaatgacggacgacccgagcgttggaatatccggacgcaccgcccagccctgtgcggatctcccggagataatcctccccgggaataacttttagcactacgccgcccggcgccagcacccgctggaattcaggatagcaggcgggcgtgaggatattaagcaccgcgtgcagactgcctgatgcaaaggggagatggtttaggtctgcggccagaaagggggcgacggccccgccgtggcaggccagggctaccgcctctttttcaagatccatcccggccggttcaaaggcgccgccctgggacaaaaaacgggtgtagtacccttcgccgcagcccgcgtccagcagcaaaggtcccggcgcgtattgggcggccagggtgcgcagcgcatcggccacaggcgcatagaacccttgcgcgagaatacggccccggctctcaaagagcgctttatcgtatttggtctggcgctgggcctggttggggacaaagttgacgtatcccttggctgagagagcaaagcagtgcccgccttcgcaccgcaggctgtgccccggagcgtccagcgccaatgatctatggcacagggggcattgcatacgggggacccagggggtatacagcgcggcgatgcgttcgatcttcataataaaataacgctccttatgccaaaaggggcgctgggccccggtttttctcgtatactataccacatcgccgccggctaaggaagcggcttgacgctaagcgtgcttgggcctataattgggggaacaaacggagggagcaggatacatatggcaaagcgcttgcaggatatgcccaatattggagaaaagctggccaggcagcttttggatgtggggatcacggatcctttgcagctggccgaggcgggcagccgccaggcctggctgctcatcagggcacaggacccctcggcctgctatatgcggctatgcgcgctggaaggggcgctgcggggcatccgctggcacgatctggacgcgcagaccaaggcggagcttaaggccttttacagcgcgcataaatagcgatatcggtttgcagatggatgcccagcagattaacagacccaaataaatgcccccttgcattggcagggtaaatgtgctaaggtctttatatagttttaacacttcgttaataaagttaaatcacttggagggggcttcttttacttcatgagtgctaaaggcaaccgcatcccactgtttctggtggtgacggcgctgttttggttcgccctgtacagctacgtgcccacattgtcgccctacgccgtttccatcggggcctcgctctccatggtgggggtgatcagcggctcctacgggctgttgcagctgatctgccggctgcccatcggcatcctttcggacaagtacaaccagcgtaaactttatgtaatactgggcatggtgttttgcgccgtttccacgctggggatggcgctgctgcccaacccctggctgctgctgatcttccgcggactctcaggcgtggcggccagcatgtgggtagggtatacggtactgtattccggctatttcccgccggagaaatccgtggcggccatcggcgtgatcaacgccgtcaacctggccgggcagacgatggccaactatttgggcgggctctccagccagctttatggggacgcggcgcccttttatctgggctttatcgcggccatcctgggcctggtgctcagcttcttcgtggtggaaaagcgggacagtgccaaaaagcgggagccgatcaagctgcgggagctggcaaaggtggccagaaccccggcgctggtgtgcgtatcggtgctggcgatcatcgcccagctgatctcttttggcgcggccatctcttttgcgccggtgctggctaaagagctgggagccaccggcggggagctgggggtgctctccatggtggctacgctgccgggtatcgtgaccaatctgctggcgggcagccttttggcccgccgctttggggaaaaggcctgtatcgtggtctgctttgcggctatcgcggtgtgctgcgcgctgttcccctttgcaggcagcctgatggcgctgtatatcctgcaatttctctgcggggccttccgctcggcgctggctacgctgcagatgggcctttccatcaagacggtggaacctgcaaagcgcgccacggccatgggtttttatcaggccgtttattccatcggcatgtttttggggccggtgctggtaggcgcggtaggcgatggcgcagggctgaccgtgggatatctgatgatgagcggatttgggctggtaggcatggtgctctccgccctctttttgggggattatgcgcgcaagcccaaagcggcgccggccacggaggcttagcgcatatcgcagcgctgtttttgctataatcgtacaagtggggtgagtaacggagcggggctctgtttaaagtttggaggggtgtaaaaaatgaatatgaccaaacgcctgctgctgctggcgcgcaaacactggggcacgctggccatcgccgcggctgggctggtgggggcggccgtgctcaacctggtcacgcccgagatggtgcggatgctgaccgcgcggctggaaaacggcgagatgaccgtttcgatgctttggatcttcgccgcgattctggtgggtgcgtacctgctgcggatgggctgccgctttatctcggtatacgtcagccacctggcggcctggcgctttgtatccgagctgacgctgactatctacgataagttgcagaccctgtcgctgcgcttttttcaggataagcagaccggccagctgatgagccggatgatcaacgacacccggcagatcgagctgctggtggcccatgcgctgccggatctgatctcaaacgccctggtgatcgtgggcgttgcaatcatgctgtttgtgatcaacccgatgctggcgttgtttacgctgatcccggtgccctttgtggtggtcgtaggctcgctgttttctaaaaaggtggcgccgctgttccgcatcaaccagcaggtgctgggcgagcttaacggcgtaacgcaggataacctttccggtatgaaggagatacaggcttttggccaggaagagcgggagcaccagaagatggacggctaccgggaaaagtacgccgcctgcaacatcaaggccaactttgccagcggtctgttccatccgggggtggagttccttacctcgctgggtacggtgatcgtggtgggcctgggcggcttaatggccatgcaggggcagatggagatctcggatatcgtgggctttttgatgtatctgagcctgttttatacgccgctggccacgctggcccggctggtggaggatgtgcaggtgacctatgccggcgcgatccgggtctttgaggtgctggacgccgaaagcgagatcaaggatctgcccggagccaaggccatcaagaacgccaaggggcgcatcgattttgaaaacgtatccttccattatgccaaggaggagccggtgcttagcgatatttcctttaccgccatgcccggcgagatgatcgccctggtaggccccacaggcgtgggcaagagcaccatcgtttccctgatcgaacggttctacgacccggttcagggccgcgtctgcctggatgggcaggacattaagggcttgaccgtagcctctttgcgcgagcagatctctatcgtcttgcaggatgtgttcctctttaacgggaccattgccgagaatatcgcttacggcgtgcgcaaggcctctttggaggagatccgccaggcggcgcgcatcgcccacgcggatgattttatcatgcagatgcccaaggggtacgagaccatcgtgggcgagcggggcgtgcgcctttccgggggacagaagcagcgcatcgccatcgcccgggcggtgctgcgcaattcgcccatcctgattttggacgaggccaccagcgccgtggataccgagaccgaggcggagattcaggacgccattgaggcgctggcgggcagccgcaccatcgtggtcatcgcccaccggctctccactgtgatgcgggccgaccagatcttggtgttggagaacggccgcgtggtagagcggggcaagcacgaggaactggtgcgccagggtggcctgtacgccaagctcagccaggtgcagtggaaaactgccgagcgccagatgcaaaacttcctgcggatggacgaagaaccgggggcctgataacggcgaaaggggcaaggctatgagatgggaactgaagattggtctactgatctttgcgctgacgttgaccgtaaagcagttttgcctgctgcctgaatttctgtcgggattgcttttgggctttggcctatgtatgctgctcatcggcgcgctgccgccaaagggttaccggaggctgagggcttggaaggcccggctgcgggggcgcgtgaggggaacttaacccagctatgccagcgtggaaaagcatacctttccactcatcaacagtatgctgcacatgtcattccgagccactggcgaggaatctcagggtactctcattgttacgactgcgcaccgcgcagcgcaggtcaagcgtcgcttttctgctaacgcaatagattcttcactccggctgcgccttcgttctgaatgacaacgtagcgcatgttaaagtatacttatttgtaagaaaaaagcgtcatctagctaccctgaaaaaatagaatatggatacgctaaagatcaaaggcccgccgggaaatttcccggcgggccttgcctttgcagacgctaaatggtacttacaggtaggggatgatatcgcacagccttccaaataccaaatctggctgggtgggtgaggcggggatgtcctcccgctgggtctccccactcagcaccaggatgcccaacaggccgtgatctaccccggtgcgcacatcggtatacaaccggtcccccacgatggcgatctggtctttgccaagccccgtgcgctccagcagcccatccaccaccgggcggttgggtttgcccaccaccgcatccggcttgcggccggtagatgcctcgataaaggcctggatggcgccgcaatccggaataaaaccgttctccaccggacagttgaaatccggatgggtggcgatgtagggcaggcccgcacgcacaaaatcgcacacccgggtcattttatcaaaatccagcgtggtatcaaaaccgactaccacgacctctggatcggcattgtcgatggtcacgccaaaatccgccagctcctgggctaaaaacgtattgcccaaaaggaagatgcgcttgccggggaagtgggcgtttaaatattgccccgtggcctggccggaggtgtaaatatgcccgtccccggcctcatccagccccatccggtgcagcttttgcacataacagggcgcgtttttggaggagttattggtcataaacaaatagcgccgtccgctctcatttaccttttggatgaagtccatcgagccgggcagcagctgctcgcccaggtagaaggtgccgtccatatccaacacaaagcagcggatgttttgcagggcctgcagcttttccggggtattctcagtatacatcgtttagcacctcgtccacatagtgttccagtacgccccagcgctccagcagccgcatcaccgtaaagcgggtgcgcacctccttggagtagagcagcgcgtcccgcatttccgcgcgggtgtagcccatatcctggggcagggccggcccgccgatggcgcgcagccagctgcgtcctttttcgatcagggcggggaaatccgccgtctgcttttggtactcgggccacagggccaatgcccgcgccttctgggcctcccactccgccttgtcggggtgcatctgggcattttccgccaggatggcctcggccgcgtcgccgtagacccggcggatctcgctctcccacttggcccgatccatctcgggcccttgggcggggataccctcggagaacaggtgcgcatagatatccatgatcaaaagcgccgccacgcctaccttgtccccgtgcagggaacctgcgctgccctcgcgcagggccttcatctcaaaataatgggcgatgtggtgttccgcgccggatgccgggcggctgtagcccagcatctgcatggcgatgcccgagaggatcagcccctccatcagccccacgatggcttccggctcccggcgggaaagcccctccgcctgggcaaggcacttgtccactgcccgggccatcatggccgctacagtggggcagtagtgctcgccgatcacctcgcgggccagcacccagtcaaggcgcgcggtcagcttgcccagcatatcgccaaagcccgcggcgatcatctgctcgggcgcagcgcacagcacgtccgtatccccgatgatggccatgggcgctaccgcctcgtaggtgatcttatacccatcatagatcatgggggagaccgaggaggcgtatccgtccatcgaaggggcggtgcctacaatgatgtaggggaggttcagccggaaggccgccatgcgggtggtatcgttaatggtgccgctgcccacggctaccagtacctttgtatcgtcccccatcgccagcagtacgtcccccagggccgcgctgtccgcatgcaggggctggtggcgcagctttaatacgcgcaccttgcgcccggcgccccgcaggacggttatgacctgctcgccggctacggcataggtgttttcgtcacagaccaccagcgcctcgcccgccaggcccagttcatccaatacctgggcgcttttggcgacggcccccttttcgatcagtatcctgcgggtggctaccttgtgggtgcgcccacattcgcaggcaaaatcctgcccgcaaagctcgtcgatacttaattgcgtcaaatccatagggcaaaactccttcccttaatccaaaaatcgcgcttgtacaaaatacctttttcatcatagcacaaccgcttcccggggcaaagcgtttcatgcaattttaaggcgtgcaggcattgcgcgcacagaggggataggctacaataaaggagtattgatcatccattttttgccatgcaaacaaaatagaaaaagtataagggaggacatggatatgggcaaagtaaagatcggaatcatcggatgcggaggcattgccaacggcaaacacatgccatcgttgagcaaggtgagtgaggcggagatggtagcgttttgcgatatcattcccgagcgggcggaaaaggctgcaaaagagtacggggtggaaggcgccaaggtgtttgaggattatcacgacctgctggcctgcaaagagatcgatgtggtgcacgtgctcacccccaacaacgcccatgcgcccatcaccatcgcggcgctggaggctggcaaacacgtgatgtgcgaaaagcccatggccaaaaactccgaggaggccaaggccatgctggaggcggccaagcgtaccggtaaaaagctgaccatcggctaccaaaaccgcttccggccggattcgctctatctgaaaaaggtatgcgaaaacggagaactgggcgatatctactatgcgcggggtttggcgatccgccggcgcgcggtgcccacctggggcgtgtttttggatgaggagaagcagggcggcggtccgcttatcgatatcggcacccacgcgctggacctgacgctgtggatgatggataactatgagccggaactggtggtgggcaccaagtaccgcaagctggcggatacggaaaatgcggccaacgcctggggcccctgggatcccaaaaagtttacggtggaggatagcgcttttggctttatccgcatgaaaaacggcgccaccatttacctggaagcggcttgggcactgaataccctgttggtggacgaggccaagaccatcctttgcggcactaagggcggagccgatatgttgggtaaagacgatgggctgcgcatcaacggcgaaaagtacagccatacctatacgacggagccggatctggcggctggcggcgcggctttctacgacggcgaggtgcccgaggctgcggacttggaggcgcagatgtggatcgaccacgtgctggacgacagcaagcccctgctggtcaagcccgagcaggcgctggtggtcacccagattctggaggccatctataaatccgctgaaaccggcgagccggtaaaattctaaatcaggttatcaatcggcattttttgtgctataatggtgtcaggcagtttgcgcgcgaaagcgcgcagacgcctggcttctttttttgtaacacttaaaaagcggctttttcttttgcccctccgctaaaacgatttaacttgggcaaattctttacgcgctgtttcttaaagcgcccgttcttataagccgcactttacagaccgatccttatcccatgaaaggagtccttcccttgtccaaatctgcattggcacaggaattgccggaagagaccatcgaaccaaacgcacaaaaacagcctaagcccaaaatacagctgcccgatggattggatgggcgcaccatggataaggagatcctgcgtctggcctggccctcggtggccgagttggttttgacatcgctcagcggcatggtggatatgatcatggtggggcagctgggcccctgggcgttgagcgccgtgggcctgaatacccagccgcggtttttgctgctggccatctttgtggcgatgaataccggtgccacggccctgatcgcccgctccaagggcgcgggagatcgggagctggccaataagaccatgcgccaggccatgatgctgacggtggggatgagcgtggtcatcgccgcgctgggactggcctttgccgagcccatcatctggttcatgggcgcgcaggccgataccatcggcccggggacggattatttccgcgtgcagtgctatgggctgctggccactaccctctctcttgccattaccgccgcgctgcgcggggcgggcaacacccgcgcctccatgcgctataatctgacggccaacgtgctcaacgtcatcttaaactattgcctgatctacggcaatttcggctgcccgcggatggaggtggccggtgcttctctagccaccattctgggctcggccgcggccagcggcatggcacttttcaccctgctgcgcggcaaacaatacgtgtgcctgcgctggggagacagctttatgcccgactggggaaatattaagcgcatcgtcaagatcgggctgcccgccatgtttgagcagctggtgatgcgggtggggatgatcaccttcaccaaacaggtctcctcgcttggcaccatcggctttgccacccataacatctgccagaatattttacagctaaccctgatgaacgggcaggccttcggcattgcggccaccacgctggtgggccagtccctggggcgcagggagccggacgtgggccaggcctatgcgctgcgcacctcaaggtggggcatgatcatctccgctgcgattgcgctgagctttttcttctttggcgagtttttggtggggctgtataccgatgacccgcagatcttacagaccggggccaacgtgatgaagatcatcgcgatcattcagcccttccaatcctcccagctggtgctgaccggcgcgctgcgcggggcgggggatacgaaaagcaccgcgcgcatcatctttgtcaccatggtatgtatccgcccgctgatggcggtagtgtttatgaacctttgcggatggggcctgtatggagcctggagcgcggtgttctgcgaccaactgctgcgccagtacctggtgcgccgccactttaaaaagggcagctggaagttgataaaagtttagtagagggatttaaaggcaattaacgcgaacgcgggcagcataagctgcccgcgtttatacttgggggaagaagattttttgcgcaaagttattcgtcgctggagagcagataatctgccgggtctacgcgggtgccgcttttgatgacctcaaagtgcacgtgcgcgccatcggccacctcgctggtggcggatgtgccgacctggccgatcacatcgcccgccttgacggtggcgccggcctcgatcacgccaccgggcgccagggaggcgtacacggtctgcacatcgccggcgtgcttcagggtcacaaccgtgcccatcatggcatcctgcgtcacgctgaccacttcgccgtccagcgcggccaccacgttggtgccttcggccgcggccatatccaggccggagtgagtcatccactgctgcagtgtttcggaaaagaccagctcgctgtcggcaaagttacggatgatctcgcccttgacgggcacctgcatctgcttggccagcttggcatcggcattggtcgcgatgttcttcggctcagaaggcttgggcgtagggacaggcgtcggctggggcgccttggtgggctcggcctgtacggcctgcgcgctttccgattcgtcagccgggggcacctcggcctgactgctgggctggactgtaggctccgccgtaggggcgggcgtggggtccagctggctcaactgcccggcggtctcctgggtgggaggcaactgggcggtgtcgctggggctccaaaggtcgctggaccagatggccgccgcgccgatggcgacgacgcatacccccaggagcaccataaagccgtatcggtcgataaaccgcagggctttagagcggttttcttttggatctttgttctcattcatgggtcttatcgcacctcctataaaagcattttttccccgggatagccttttcataccccatggggtgtagttaagttgtaaaacttccaccctaccggcatggtgcgccgtttattgcgcatacaatggaaagcgagcgcacagctgaaaaaataagccaaaggaggccgtcgcccatgcgttcaaccgttcccatccgccaggggcgtatgcgccccagcgttcagcgccgccgtgtgcagggccgccgcaaggtgaccctaggtggaaagcttttactattattgctcatcgcgcttatgtttatactgctgccgcccctgctttttgccggggaccggggcagcgtcaatcttctaacgcatgcagccgcaacgggccgcagccccattgacgtatccgtaggtgaggggcaggccgatgcgcccaatcccacgctgaaagtgtataatacggaaagcaaaagcctgatggagctggatctggaggaatatatctgcggcgttgtcgccgctgaaatgccggccagctttgagattgaggcgttaaaggcccaggcggtggctgcgcgcacgtttgtatgccgccacctgccccagtttggtgggcagggcgccggctgcccagaaggggcggacgcctgtaccaattacgcccactgccaggcctatatcgcacccgaaaaacggcagcagaattggggcgcacaggcccagaccaacgaggaaaagattcgctctgccgtggagcagacccgcgggcaggtagccacctataatggggagctgatccaggcgtttttccactccaccagcggcgggatgaccgaggactgtgctttggtctttacccaggatctgccttaccttaaggcggtggagagcgcgggggaggagggggcgccccattaccagcgcagcgtcaccctttcggcgcaggcttttgcccaaaaagtaaacgccgccctgcccaaagcgggcttaaaggcggacgcgttacaagaacaggtggatgccggcaatcgctcgggcagcggacgggtcctgcaactgcgtctgggcggcgccaccatgagcgggaccacctttagatccttgttggggctggattccaccaattttgaaatcagtttttcgggggatcaggtcaatatcctgacccatggttacggccatggcgtgggcatgagccaggtaggtgcggatgccatggctaaaaatggctctgactacagggcgatcttactgcattattacaccggcatcaccatcagtaccctggggtaacgcctcgcggtggatatccgcccccagcgcggccagagatagctccaggccttgatagccccggtcgatgatctcggccccgtctaccacggtttcgccctgggcgacaagaccggccagcaccagcgccgccccaccccgcagatcgggcgcggtcacccgcgtgccgctaagtggccaggtgccggtgatcacggcgctgcgatcctccagctggacctgggcgcccatgcgcagcagctcgcccaggtgcgtaaagcggttttcaaacaccgtctcggtgaccacacccgtcccttcggccaccgcgtccatggcgcagatcagcgcctgcagatcggtggggaagccgggatgaggcatggccttgatatccaccgccttaggccgcccctgcatcaccacccgcagggaaccgggctgctggtcgatctgcgcgccggcctgctgcagtttggcggtgaccgggctcaagtgctcggggatgacccgctgcaaggttacatccccgcccgctacagccgtggcaatcatcagcgtgccggcctcgatccggtcggggataggggtatagcgcaccccgtttaaggctttgacgccggtaatggtcagggtgtcctgccccaaaccgtcgatcttagcgcccatagtgcgcaaaaacgccgccagatcctctacctccggctcggtggcggcgttgacgatcaccgtctgcccctgggccagtacggcggccatcaggatattttcggtcgcgcccacgctggggtagtccaggtggatctccgcaccggtcagcttttcagccgtaagggtcacgatgccgtggcgctgctcgactgaagcgcccaactccgccaaaccttttaagtgcaggtccaccggccgggaaccgatattgcacccgccgggcatgggtacctgggcgctgccgcaacgggccagcgccggtccggctaccagaaaggaggcgcgcagctcgcggctccatttttccacttcttcacagccgctgcagggtttttgggtttcgatgcgcagggcgcggccctcccgctgtactgttgcaccataacagcgcagcacctgggccatgttccgcacgtcgcggatatccggcacctcctccaggatcaccggcccccgggccaaaagggccgcggccatcaggggcagtaccgcgttttttgccgaatcgatctgaactttgccgtgcagcggccctgcagcgcgcatgacaaattgactttgaatcctcgccacctccacgtttatcctctcctacgatataaaataagccccgggcaacttgacgcccggggccttgctgctctacctctattatggctgcggggcatgcaagctacccgtgccaaagtgtgggtgaaccgccaaaaaatcgatcataaaaaccagctcagttttcctcctgccaggctaaaagcgcctgctgagccggattgtttaacagttttccatcaatatcaaagcgcgaaccgtggcaggggcagtcccagcttttatcctgcccgttccattgcaggtggcaccccaggtgcgggcagcggatggaaacataatgcgccctgcccgcctcgtcccggtacaggccgtagtggccgccccgcgcccgtacgatacccgcctggccagggcatatctgatctgccatacagttggcccggggaaatgcgcccgataacaaatagcgtgcgctttttccaccatcttttaccagatttttcgccccggcgcgtaggtgcaaccggtgaggatcgaaaagccaggcccaggggttgtcccgctctaaaatcaggtcggaaaggatggaggcggccaccatggaggtggtcatcccccattttttaaagccgcaggccacgtaccagtcgcttttgcggggcgaatagcggccgatatagggcagcccatcggcggggatgccatcttgcgccgcccaagcggctacctcgtgtgcttcagggtacagcgccttagccgcggcccgcagtggggcgtagccgtttgccggccccatttcacccgtgcggtggccgcagccgcccagcagcagatattcgcctgcgttgcgcagggacaggccgttctcctgctcatccagatacatcccctgtaacgctggcgcgcccgagagcgccagaacatagctgcgctgcacgtgcatgcgggcgaaaaacagcccggggtaattgacaaaagggtagtggcaggcaaagattacctgcccggcgcgcacccggccgccgggggtccgcagcacatgcgtgccctcgaccgtaacggggctgtgcacatagatctcaagcgtggcgcttagcgcctgcaaaaagcgcaggggatggaactgggcctgattcggaaaggccaacgccccgccgatggcaaagggaagttcctgcgggtgggcgatctgggcgttgatccctgcgcggcgcgcggcggcaagctcccttttcagcggctttaaatccgtgccacgggtataaaggtaggccgtacgccgggaaaagccgcagtcgatgtgccgctgctcgatcagcatttgatactggccgatggcccacaggttggcctgggcataggcggccgcggcgcggggccccagcgttttttccatattggcataacattttccgtgctgggcggtgatcttggcggtggtaccggctgtttgcccccgggccacctcgtccgcctccagcacgatgaccttcagccccgcctgctgcaggtaaaaggcggccaaaaggccggccatccccgcaccgatgaccgccacgtcgcattgcttatcctcttgcagcgcgggaaagtcgctttgcagcgcatcccgctcccagatcgaacccatgcctaggcctcctttaatcacattgaataaagataagatggccttttttgcgctttactattcttttgagggcatcttgcggctgtgccgtggaaaacggtataataaactgtagcttttgcaaaataagtggacctggattaaacgggtgtaaaaggaggcgcttatggcgggattggcgtgcgcggcgtacctgtttggcggcttggcgctttcgtttcgcttttttaagggcgaagggcgcgcggcctggctgcttttgggcggcgtatgggccacggttttttgtgccgtgctgcccgcgctctgggcttttttatggggctttacggcccaggccaacctgtgcgccgcgggaacggccctggtcttaggggcggcctgcctgccctgggggcgctttgggcggacgcgcggactggtgcggtttggaaggctcagccggcgagaagtgccgctgctgatgaccgtgggcctgctctgcgcagtggcctttaccctcacctttacccatgtgctgcggcccgatgcggccggtgcgctgcacagcggccagagtacctatggcgatatggccatgcacctggcctttatcacctctttagccgagacgggccgctttccgccggtctatccgctgctggcgggggaagtacccatcggctatccttttttatgcgagaccaattcggccgggctttatgcgttggggatggatttgcgcctaagctacatcctgcccatgctgctggccatggggtgcatctttctgggggcggacctgcttttccgccgcatggcacgtggggatgcgcgcaagacagtgctgagcactgtactcttttttgtgggcggtggatttggctttgcttactttttagacctgctgcgctcggatcctggaaacttcacccgcatcttcaccgctttttatgaaacgcctaccaactataccagccacaatgtgctctgggtcaatccgatctgcgatctgctcataccccagcgggccacgctgtttgggtggacggtgctgtttgcctgcctgtacctgctctaccgggcggcctttgaggggaaaacgcgctatttttatccgctgggcattctggcgggctgcctgccgctgatccatacccactcctttttagctttggggattatcagctttgtgctctttttgcgggcggcggcaaagggccggtgccggtggggggcgctaaagccctggctggcgtacggcgcgctggccctctgcctggcgctgccccagcttttcgccttcacctttcgccaatcctcggccgaagggtttttgcggctgcacctcaactgggccaacacccaggatgaatacctttggttttacattaaaaatatcgggctgacctttttactacttattcccgcgtttttacatgcggatgcgcgcaaccgctggttttatctggcgggcctgcccatcctgatcctttgcgaatttgtggtattccagcccaatacctatgataacaataagctgctttacgtatggcatcttttgggctgtggcatcgtcggtatcctgctggtggacgtgtacgaccgcatgcggggcatccgcggacgggtgtatatcgctgcgttgacgctgacggcgctctgcctgtcgggggtattgaccctggggcgcgaggcggtgagcgattacgagctgttctcggccgcatcggtaaaagcggcggcatttgcgcgggaaagcactccgccccaggcccggtttcttacggcggataaccataataataccattgcctccctggcggggcgggatattttgtgcggcagcggcagctacctctactttcacggagtggattacgctgaggcgcatgcggccctgcgccagctttacgagcagcccacaaacgagctgttagagcaatgggggatcgattacgtgctcatcggcgcctacgaaaggggcggctatgccgtggaggaggatttttacgcgcgcagcttccccgtggtgtacgacgatggacagggtacgctgatctacgatgtgcgcacccgcgcggtgggataggcgcgggcggttaaaaagggaggatacggacgtgatctatcgtctacaggcggatggcctggcacccatggcggcgatgcccgcagtcaaagaggaaaaagcgctggtcatctactcttttgaggaactggaacgggcacaggaggagctggggcttgccgcaagcctggcccaggtatgtttaaacgaacgggtgaccaagtttgagagccatccgggctttgattttatgacgctgaatatacccgccgagggtgaaggggaaccggcccggcgcatctgcatctacctgcgcgaaggcgtattggcctttttatgcggtacgccccaggtagcccaggcggtgctggccccctttcaggccatcgaatccggccgctttacgctggaacacctgcttttccactttttccaatccctcacgggggaggatgccggcaagctggaggttatcgagcagcagattgaggagctggaggaggcgctgatcaccggagaaaaggaaaactgcatccgggagatcatcacgctgcgccgcagattgatgcgcctgaagcgttattatgagcagctgctggccatctgcgaggcgctggaggagaacgaaaatggcctgctgccccaaaaatccctgcgctatttcaggatgatgacgggcagggtcagccggttgtgcgccgcggtgctcaatctgcgggattacgtgacccaggtgcgcgaggcctatcaggcgcaggtggatatcaatttgaaccagatcatgaagttttttaccgtcatcaccaccatctttttgccgctgacgctgatcgccggctggtacggcatgaacctcaaaatgcccgagtacgggtggccctttggctatccgctggtcattctgctgagcatcatcgtggtggtgctctgctttatccactttaaaaaacgccgctggttttaaagcgcggcaaaaaaacagataaaaaatttggggggatgtttaaatggaaaagaccatgcacgccgtggtgacgcacggcatccacgattacaggttggagcaggtgccggtgccgcagccgaggccgggggagctgctggtgcaggtagaggcctgcggcatctgtgccggagacctgaaggcctttatggggggcgagcggttctggggcggcagcgaatttacgccttatgtggaaatgatcataccgaaatggatacaagggataggcaatattaaaaaagtgtgcccttgcggtgtaaaaatggttcttgggacataaaagatactgggattatccggttatttttataatatatgaagagaagagatcgatgttatttgttgaaacgacatcacgagaaagtatggaatcgcctagcgaaatatctcgatattaccgttgatgagctatatcaagatattgatgatgcagcggaaaaagcacatagtgactgggcatttaacgcagatatttttgagcaggaaattgcatctaccgtagagaatcttcaaccattagaacatattgatagcgctatgtgtttcctttgtctcgtcgattgaatgagcgctgaagcatttatggattgatgggggtgaacctatgccttttacaattgtccgacaggacataacccgaatgaaggttgacgctattgtcaacgcagccaacacggacctggttatgggcggtggcgtctgtggtgctattttcaaggccgccgagcctgccaagctgcaagcagcctgcgataaggtttcgcccatcaagcccggcggagcagcaattacccccggctttgaccttccggcgaagtttgtcatccatgccgctgggcctgtgtaccgtcattggaatgccgagcagaatgagcagctgctccgaagtgcatacgcagaatctctcaaactggcacataagcacaaatgcgagagcattgccttcccgctgatctccagcggaatctatggctacccgaaggacgaggcgctgcaggtagcgactgccaccatcaaagatttcctggatgatcatgacatgaatgtgtacctggcaatttttgaccgggtcgcctttgcagtcagtgaggacctgctgggagctgtggaaagctacatagacgaaaactatgtagacacctaccatgtccatcgccgggagttgctggaagttgaatataaggcattgagcgatgcaatgatgccacccttattcgcagcacctatggtgtcctccaaagggctggatgacttgattgacgagctggacgagcccttcaacaccacactgctccggctgatcgatgccaaaggaaagaccgatgcggaggtatataaacgggcaaatatcgaccgaaagtggttctccaaaattcgtactggcaagggctatatgcccggtaaacggacgattctcgcccttgccatcgctctggaattgacattggatgaaaccgatgatctgctggagagagccggatacgccttgtcccacagccagaaatttgatgttatcgtggagtttttcattgtcagcaggcaatatgatattttcgagatcaataaagtcctgttcaaatatgaccaaccgttgcttggagcgggctgatcgctgtcgctttcaaagcgaccaaaagaaagcccttttgctgtaccctacagatacaataaaaaagcaggagggctttcaatatgaaaaggaatttgacggaactggtattcatcctggacaagagcggctccatgagtggcctggagaaggacaccatcggcggctacaactccatgctggagcagcagcggaaagtagacggcgagtgctgcatcaccacggtgctgtttgataactgctacgaattgctccatgaccgaattgacatccgcgccgttaggcctatctccgaaaaagaatactttgtaggaggctctacggctctgatggatgctatcggtaagacaatccgcaaaattggcactgcccagaaaaacatcgccgaggattaccgggctgaaaaagtgatgtttgttattatcacagacggcgaagaaaatgccagccgccagtattccgccatgcaggtcaagaagttgatccagcgacagaaggaaggatatggctgggagtttatcttccttggtgcgaacattgatgccgtggaaactgccggacgatttggaatcgatgcagaccgggctgtggactatgtgccggacggcaaaggcacagacctgaatttccgcatgatgagtgagaccgttgcaacctttcgggagtgtggagccgttcccaccgcttgcctggacgagattagaaaagacatgaagaaaagaggtggccgcagatgatgggcgcaattatcggtgacatcgtaggttctgtctacgagtggcacaatatcaaaaccaaggatttcccgctgttcagtgacaactgctttttcacggacgataccgttatgactattgctgtggccgaagccgtcatgaacggcggcgagagggatgacttcatcgatgccatgaagaaatatggcaggatatacccggatgctgggtacggcggaagattcggcgcatggcttttttctgacagccgtgaaccttataatagttttggcaatggctctgctatgcgggtttcaccatgcggctggacaatggactgcggcttctgcgccataacggggatgtggcctagcaatggcagagccagggcgaatctttccgctgaggtgacccataatcatccggaaggcatcaagggtgccatggccactgcggattcgattttcatgtgccggtattacttcggcggatattgcggcgattacgaaacgcctatcgatgataaccctgcagaatgtaaacggctcatcaaggagcatatcgagcaggaatacggttatgacctgtcacgaacactggatggaattcgccccacctatcggttcaacgcaacctgccaggatacagttcctcaggctatcattgcattcctggaaagcacggacttcgaggacgccatccgtaacgccatctccctcggaggtgacagtgacaccttggcagcgatcaccggcagcattgcggaagcggcatatgggattcccggctggatcgaggagaaggcttggacttatctggacgagccgctgaaagatgttctcaagcgatggaaacagtatattgccagataagacggtatgaccaaaccttttaattatttgatttttactacaccgcaaggcgtacaccccaccgcattaccaagcggcaacaggacaattgaacacataaaacaagggcttccgaagtcagcatttgacctcgaaagcccttattttatgcctttttcggcggtttcgaccccggagaaggctttttctattgtatcaaaatcagcaggaatatagagccgccctgtatcccggggcacgagttcatcggcagggtggcccaagtgggggcgggatatgacggcccctttcaggtgggcgaccgggtgaccagcgagcacatcgtgccctgcgggacgtgcgcctattgcaaacgcgggttttactggatgtgcgagccccacaacgtatacggctttaagcattacttaaacggtggttttgccgagtatatgatctttcccaggcaggcgcgggtctttgcggtgccggagcaaatggcgctggaggacgctctgctgatcgagccctttgtctgcgccatgcacggagtggaccgggcccgcattgaaaaaggggatgtggtggtgatctccggcgccgggaccctggggttggggatgatcccctacgcgcgcaggtttgcccacgcaaagatcatcgctttggatctaaaggaggagcgcttggcgctggcccggcggcagggcgcggacctggccctgaacccggcccaggatgacgtatctgcccagatgatggcgctgagccagggttgcgggtgcgacgtgtatatcgaggtggcggggcacccccaaagtgtgttgcaggggctgcagctgatccggaaaaaggggcggtttgtggagttcagcgtctttggtgagaaaaacacctgcgactggtccctgatcggagacgccaaggagctggacctgtacggttcctccctcagcccggagtgcttccctaaaaccatcgccgggatcgccgacggcagccttcccacagcgggcgtggtcacccatatcctgcaactggaggattttgaagaagctttccggatcgccgcccagggcgggatcaaggtggcgctgcggccataacgaacaaaacacccgtaaaagtactgtgacaataaaaaaaccgcctacaatcagcaggcggttttctataccaagcggtttaatcgatgctgttaaaatcctttttcagttcggcatctaccatctcccaggcgctctggccgtactgggccttaaagccctcgatagcctcgtcgatggcggcttgccctttctcgccgtatttggccagcgccgttccggtaaaggcggccagcagatgcgctacgtggtaggggaaggggaggatggcgctctctcccaactgggctttgagcgcggtcagccgctccagcgcgtccgcgtccatctgcgcgtccaggaagtggaactcgcactgggcatccccggcggtcaggcaggtgggcatattcaggcgcagcgcggggttgaacccttccagcacggcccggtcgatgtcccggcaatagaaattagcctctttgcccatgtcaaaggtcttccaggcctggttccaggggcatagccgctcctggctgacggcgtagggcgtctggcgcaggcttacgctgtcaaaatcggtaggattggagggcttccactccttaagcgccatgtaagagaccatatccagcggcaggcccaacttttgcgcgcgcagggccatgcgccggccccgctggcggccgtaggtcaccgtggcctcgtgcacggcctggcccgccgcatcccccaggtgggccttaaaggcgcgcaccagcagcccgtacagcaccgcatggtgttctacgcccagcaccggcggcagcggatcgcccaagcggtagccatggtcggtcacgatgcgggcacaatcggccgcggcttcccgcagggtagcgatggtattctcgtcgatctgtccctccagcgcggcaaaggcgcgggcgagggggtactccatcctttgatagaacacccgtagggccatctcggtcacgccgcccttggtggcgtgctggaaggcggttttaaccacctgttcccgcgtttccacctgcagggtgtgcaggtgcaggtccacatagttgaggaacaggtcgtcgatcagctggcggtccatccccaacgccaggcaggcgtcagacaccccgtcgtacagggagcggatcacctggtcgatggccgggcgcagggcttggggcacgtcctcctcactgcaggggcgggtgggctcatagtggtaatgggtatagcgctgaaaggcggcgcgcagcgcgctggccacctgcgcatcggtcagactgtagccgcgcttattgcagaccgtgcggatggtatagacgtattcgctgaccgtgtgcagcgtgcactgcccgccaaggtaggccatgaccagatgcggcggggtattgacgcaggcgccaaagggggagaagaactcccgcagccgtgcctcgtgatcctggggccacacatccccctcggggaaggtgatctcggtcacgccctgggtggccacgtccatcccgctgatctcggtgagcatattgggcagcaggttgaccacgtggatatcctgccccaacagatcccggtagaattggcccacagggctgggcggggcggcatacagatcgggcaggggggcggattgggcccgcagttcgtcataatagggcttgagtactgtgcgcgctacctctggggccaggtagggctggggagcgaacaggatgatatcgggcctcagggtgcgcagcatctcatcgttgcgcttgtaccatacccggatgcccatgcgtgcctctttccccgggatcgcatcttcctgtgcggtagtgccgatcacgcaatcgtacaggttctcctcgcccaccagatggcggacgcaggggaatagatactccagcagaaacccgacgcccagcagggcgatcttcgtgttatgatagggatgcattttttaagcctcctttgatttttaaagcgggcccgcgcgggaaaaagcgcgttggccttatctttcattataagcctatatccccgccgcaggcaagggtttaacccctgggggcgcagctttcgcaggccttggcgtgcacctggcggcgcaggttctccatcccctctacgccccgggcttcaaaggtaacgctgtcggcaatggttgcacccatccgagccatatcctcaatattgacccgctgaatctcatcggtcttggagctggtgcaatcctccagcaccatgacgttgtaatccagtgcattggcatcataacaggtggtgcgcacgcagttgggggtggtggtgccggccagcaccacggtttcaatatctaacctgcgcaggatcaggtccagctgcgtttggaaaaaggccgaccagcggggtttgacgatgataaaatcccccgcttggggcgcaagctccggcggcatctggcaagagagcggcccactgctgcccggcgccatggcgcgtccgcccgccgcccactccgggtagcgggtgatctctacatcgctgccatcggggcggtactgtcgaatcacaaaaaagatggggatcccccgcttgcgtgcagatgcgatggcgcgctggcagttgggcacggtttttgcggcgctggggatgcaatgggcagattgcggcgagagaaagcccatctccatatcgatgaggatcaaggccgcgttagcgggttgagacatgcggaaattctcctttcacgtttgcaaaaaaagggctttttgcccatagttcggtcaagaatcttgagaaagtacagatgagctgaacgcgtagcgtaatcgcttaacctcagctctaaactcccggcagcaaggccagcgcccgctggttagagtggcttttggtcatgtccgcgcataaactcggtcacctcaaagcaggtgatcaaatacgcatcctgctcttcccactgcaggggagcggcgtaggccatcgtccagatgccgtaccgcgggttatagtattgctgcgggccggtgccgtgtcgcaaggggcagtgggtgcagggcgcctcgcggccgtaaaaggcctggtggcacttttgcccctcagcggcgcgagggtccagttctaacgtcttgcggttgaggtacaaaagggtataatcaccgtccacgacatagatataggcgttttggctgtccaagatgctgttcatccgccgggtagcggccagatcctgctcgtgggcgcgctgtttgagcaaaaaggtgcttagcatttgggcgatcagcgatagggtagaaacctcgtcctgcgtccagacccggttgccagtgcactcgtcaaagccgataaagccgcgcatcacgcccttttcgcggatggcgcactgcaagatggcgtggatgccctggctagccagaagcttacgctgagaggtgggcagctcccttatatccttgcaatagaaaatgccgttggcggcaaagttatccccataattctccagctctgcatagttaagctcctgcaaaagctctttttcaggggtgatcctctcgttgcaccactcaaaggtgttgctggtggtgcgcccgtccagcgagttctcaaaaatgtacacccggcttacgtcaaagcgcttacccaggatctccataagcttgtggatggcatcgcgcagatcctctgtttcatacaagatacggaagatataattgaccagaccgcccgacacgcctagggtctcctgattactgtcgatatccgcacccagagcggaggtgccggcggcgtaggggagagactcgcgctgcgggtcgtaaagggcgtgctggtttttgcctgcggtcttggcttggtacagcgcctggtccgcacagcggtacagagaatggaagcttctggcgtgggcggggaaaagggcgatgctgatggacccggttacctgcaggtccagcttatcggtgcccgcaaacagcgtgcggaatagggctagcagctgggcggctttttgctgggcgagttccgcactgggcagatccttaagatatacggcgaattcatccccgcctacgcaccccaccacatcgcttgagcgcagctgctttttcatggcgctggcaagctcggtaagcaccatgtcgccaaacaggtgcccgtgggtatcgttaatgtttttaaagttgtccgtatcgatcatcagcagcgcgccggtctcattctccgggcagtcgtgcaggtatttttcgatctgccgctcggtttcctcccggttatacagcccggtcagcgcatcccgctccgcctttttacgcagatgctcgatcatgcggatctgctcgtcgatatcgctgatcacgcctacggccttaaccggctcgcctttatcattaaattggtccgtggcgcgcacatggcaccagatataacgcccctcgccgttcaaaatgcgaaactccgccgtattatagggcgtaccggctctggcagattgcatcagcgccataaacgccggcagatcttccgggtggatgtgccccgtggcggggatgtgtttggaggcatcctgcttaaccggcgcataaccaaatttctttagccagttgcccgaatagtgcagctggtcggcgggaatatcccattcaaatatgatatcggtggtctgatccatgatgatctggtggcgctccaggctcaggcgcagttcctcgcgcgtatggcgctgctcggtaatatccatcatgacgcaatagtaacaaagcgcgccgtcttcctgaacggggctgcattgctccagcacccagcgggggggcgccatctttgcagatgatccggtactcgatctccagcacgccgctgcgcaccctgctggtgcgcacatggtcctgcaccgctttccggtcctccggaacgatcatctcgatataatggttgtgaaaaaatcgttgaatttcctcgggagtgtagccgaatatatccagaaaactttggttgtaatggagtatggtgtaatctttatcgcccagacagcgcagcacgccgccgggtatatggttgacgatttgatgtagatccattccactggtgggcatgctgtcacctccttacctaccccatcacaagggtgccgtttataatggagcgaccggtgggcgtaacagacaaatgacagaattaaatccaccaggccttgtggtcatgatatgatctatcataccctattttgtggttttccgcaagaaaagggagggggatgtagagccgttatacagcaaagactccgctcgaatcgagtaacgaagataagtgaagaaaaaaagctggggccggcggcaggtctgttataagttggtagcgaggcggaaaagtggcctccccgtgttggaccgggaacccaacggtcctctgttcgctatggattcgtcctgcgcagcataattgctgcgcagggcttatctcgtgctcacagaaatcatcgcgcccttcatccgccaccggcggcgggtgctatagatttccctttggttaacgccgcgcggctgttaaccgcagatgctgctcaaatccagctacagtaactaaaacaaaacacaccctataacatagggtgtgttttgcttgtcaagaggtagcaaaagagatgccctcccatttttgaacgatggatttgagctcgcgaaaagttggtagcgacagcgagccgtcgtgagggcgtttacaactgaacaggcgagatgagcgtgactttttgcgaaaaaggaggagcaaggaagcgggcggatgtttttcttgcaaagaaaaacggagcaaagcgaactttgctccgacgtggctccccgttgttggactgagaacccaacggtcctctgttcgtaatagtcgcagcgagcatgaataatgctcgccgctcctttactcacagggctgccgcctcgctgcttccgccaccggcggcgctcggctctgccccctgcggaaccgcaggatcgttacgaatcaaatacagaagaaaaaacaagagatacctgataaaggtatctcttgtttttggctccccgtgttggacttgaaccaacgaccctgcggttaacagccgcatgctctaccaactgagctaacgaggaataactttgccgccatttcgtttggcgattacacgattattataggcgcaaatccctagataatgcaagggattttttggcaattttagcctgcaattttttaaaaatacagcccgccgtttaacgcggcgggctgtccagtctcgggttaggaaaggcgggtgcgcagctggctggtcatctggtcgtaacaggtatcaaaatccgtcttgccctcaaaatagggagacatgcaggcataaaagatatccgccaccgccgggtccggaagcgtgcaggtggtaatgctggagaatacatccatgtagacctgcacatcctcatccgtcaagggctggctgcttttagcggttgcagatccctgccccagcacgccgcgcaggttgtcctccaccacggcggtgtagaccggcgccttatggaagcccagatggatctcgcgctgcacatcgctagagagcatggtcttaatgaacttataggcgttttccttattctggctgtccgatgcgatggccagcccagccgccatctgagcctgtgcgctgcccttaaagtccggtatggggaggatcacaggcgtttgcccatccgcctttaactgcaggtaaccctccatgatggtaaaccccatatcttccaggtaaaaggccacggcgtccgcgctgcctgtacgcagaaaggacgataacgcgtcggtattgtactttagctgatcctgttgcgttaggccgtctgctgcggcgtagggtttatagctttcgcaaaactgttgaaaggcggccctgtccataatagcgccctgctcccggtcatagattccacccgggctggaaaaggggaacatctggaaggcgccctgctgtgtcagggcaaccgccttttcaccactcagccggccttgcgcggaggagacctgcccgaagagcccgctaagatcggtacaggcattggggtcaaaggctagattttgcatgatctcctggctggtcagcaacgccggaacctgaaaacagatgggcacgatataacgctgccttttgtggagcccgacatccagcatagcgctgtttaaaccgtcgccgggctgtacgtcccacatggcgcttaaatccagataggtacccttttccatctcggcgtaaatgtcggccgagccgcccggataggcgctgggattaagcccgttgacgtagaggatatccggcgcgggataggaagggtcgcgcccctgcgccatctcttgttccgataatttgtgggtgatcacttcgacctccgggtacttttcctgataaactttgatgatcatatccagtaccgttggttcaatgtcgatcatgccgatgtcaatgtaaagctgcgaggtatagctcgggtcgctctgggaggccgtgccggaagcttgctgctccaccactggcgccagctcataccccgtgcagccgaaaagcagcgcgcagacggctatcaagggtaaaagcccggcaaggcgacgtgtttgtgctcgtttcataaaaacacctctcttttcagtttttgtttatatagatttagtttataatcgcttcgttttgctgaatcatatatgcggcgcgacggtatacagtagaaaaggccaacattaaaaaaaacacttatatttacattagataatcaaaaaatgagtataaatttgtgtgaagtaaaaatatttaacctataatcaacaaatatagataaatttattcttgtatgatatatatcatattttgcttttttttaatactgcatatctttacctttcattccgaaactttgacaaatacttaacaagtttgtgccatcaagggctgctatcagtacaaaagaatgagtaaaaagccctgcgaaatttcgcagggctaaatgataattggaataggatataccgcccgcgggtcaggactgctctggcggcgcttcggacgccttgcctttgcgcctggctatgccggtctgcacggtatcggccacgaccacggccagcccgccgaagaggttgaagtaataggtgacagtgcgccacagcagcatggccgccagcatcatatccgccgggaatacctggccaaaaaacaggtaaaagccgccttcactggtgccgctggcccccggtacggggatgaaggtgaccgacatggtcagtaccgactgcatcagcaaaatctccatcagcgagcccagggtaaacgcggccccggtgcaggccaggtagataaaataggtgatgagaaaataactcaggatctgcccggcccccagaaagaaagcctgcaccgtttttttgcgctgatcaaacagggcgcggatgctgacccggtactgggcgataaaggcgtccaccatatccaaccagcgtttttcatccttcaggatgtgcaatttaagccccaggcgaatgaaaaagcggcagatgccctggacccagcccggcttgatcaccgccaggatgccgcctgcggccgccatggcgttaagcacatatcccaacagggccacggccaacaagccatcgtttagccggttccagcaaaaggggatggcgatggtggccagcagcccttctaccacctgccaaagcagaaatttaccgaccagtacgggggtggaatccgccgccatcacgccccagcggcgcaggtagacgatctgcgcgggctgcgagccggtggaacagggggtgatagctgcgtaaaaatgaccgaccagcgataccttgagcgcggacgcccagcgaatgcgccggcccacaaagatcagcagccggtggatggtgcaagcatcgaaaaaccagaagcccatgatgccgatgaccgcggggatcagccagggcaggcgcactttccgcagcgcgtcccccagggtgggcatctgcgggtcccccagcaggataaaggcgactacgcccaggatgaaggcgatatacagcacgtacagatagggcttaaagttgcgtttgatcctggccataaagggcccctttctatctccatgtttaggatctatgcgttaaatacggggtattatagggtcatgccggcgcgtttgtcaagcatcctagcggccaaagagccagaattaagaaaatcttattaattaaggctaaagcagcaatatcagcgtgcccgctacgatcaatcccagccccagcgcggcggcgggggtgagcttttctttaaagaccagggcggaaaacccgatgctcaccaaaatgctgagtttatcgatagggaccaccacgctggccggccccaactggagcgcccggaaatagcatagccaggacgcgcccgtcgctatgcctgaaaggcccaagaagagccagcttttggggtcgatcttctttatcgtatgcgccttgccgctgaccagaaccaccacccaggccatgaccagcaccaccccggtgcggatggccgtgcccaggtgcgaatctacgttttcgatgccgatcttgcccaggatagcgttcaggctggcaaaaaccgctgcgcctaccgcataaaacagccagccatggcccttagtggactgggtggcgggctgttttttctggatcatcaaataggtgcccacgccgatcatcgccatggccagaaccttgagccaggtaacgccctcgcccagaaaaagcatggccagcagcatggtcagcactgtactggatttatcgataggggtcaccttattgatatcccccagcgcaagcgcccgaaagtagcatagccaggacgcgcccgtggacagcccggacaggatgagaaaaacccaggtgtgcggcgctacggtggatagggaggcctgtgcgccggacacaaagaccattagccaggaaaaggccagcaccacgatggtgcgcagcgccgtagccaggttggaatcggtattgcggatgccgcacttggccaaaacggcggtaatacccgcgaagaacgcggaaccaaaagccaataggacccacataacgataaacacctcgcttttttgagggcggccagaggccggcgccacccccagtgtatcacggccgcgcgtccggtgtatagcgcaactaaaaagggaggggcacaatagcccctcccttttgactgcttaaaaccttagaacgggatattatccgggtccctggaggggccgcaacaatcggtcaggttggcgatgatctccacgtcctcttgagaaagcgcaaagtcgaacacctgcgcgttttccgcaatgcgcgcgggggtaacggacttgggcagcggcaaaaagcccatctgcaggctccagcggatgcagacctgggcgatggatttgccgtatttctgggcgatctgctgcatctcgggcacgtcaaagatcttgcccgtgcctaaggggctgtaggcctccagcaggatgttatgcgccttgcagtagggcgcggccaggggctgcacctcgccggggcatagccgcacctggttgaccatgggtgcgactttggcagtcttggccagggcctccaggtgatggggcataaagttgctcacgccgatggcgcggatgcgcccggcggcgtacagttcttccatagccttccaggtctcggcgttggcctgctcccaatgatcccgaaatttgatgggattgggccagtggatcaagtacaggtccagatagtcgagccccaaaagatccatgctcttttcaaaggcggccatcgtcgcctcgtagccatggtcggggttgttgagcttggtggtgataaacagctcttcgcgcttgacgccgctgcgcctaatggcctggcccacgctgccctcattaccataagccgccgcagtatcgatgtggcggtaccccgcctccaaagccgccagcgtggccgcaacagccgtatccccatccggcgtctgccaggtgccaaagccgatgcaggggatcttaacgccatttgccagggtgtaggtatccgttaaactcttcaaaatgcgctgcctcctttttggtttttctatttttcattatagtacggcataggggacaaggcaaatcaaagcggagatgctgcggcgtacccctttatttagcgctttagatagcatatactgttaaaaatagttcccggcaaaagtagccagggatatacaactacacatagccttggatgggggtagagctttctatctttgtcgatccgaacaacacgaaaaatctccttatgtcctattggcatcgcctgcaccgcgctgcccgggtcgagtgtcgctttcctgccgacgcaggagtttcttcacttcggctacgcctccgttctgaatgacaacgcagcgagtgttaaagtataccttatatactcatacaacccacccttaacggttgctacccctgccttcgaagatgagccgtgcgcccattagctatagcggtttttatatgaggtaaatgaaatggttcaagattccttccttttttggagtgatgcaacatgctcgggcgaaggctcgatgctagagcatacggctgttttgggagaggagccgctggaaacgattttatttttacacaatgcaggaagctataagcgggaaatttcctatcggctgctcaaggattttgaggaaattcccctgccttggtacaatgaatcgggtgaagattgcccaagtgattttacaatagaagctgccgaagaaaggaatggggcagtctatcctgccgcctattatttagacatcacaccacaaatgggcgcgggaaggtacgcgctggtgctgcttgataaacccgaaggatcgatccagcaaaaaaggcagcaggcatccaatgcaatggcaacgcgcacaacagtcatctatcaaggtgaaaatataacggatctgcctcatattacagcgctaaaggccgtttcttatattggtgatattccagcaggcggattgaaaatcgggcttgaaaatgggtttgaagtaccggcaggtaaggtggcgcatacgacgctgcgtgaattgaaccagcccatccttgtagcactggcccaatacctggaagaacagggggttgattccgcgccgatagcgggccaaaccgtcccggtggtattgatcggctattacgatggaaacttattaccgcaaaaatatcgctgcgagatacccgttgatcgccccgtcattttatatcctgaatgggaactgccggttggcggggaagaacatatcctcaacgtttttgctttttgctatcctgacaacaccatcgaaagcctgccgaccttcgcacagaaatttctatttaattctgcgtcaatgttaaacgacggcatttgcgtgcaggcaggggaatgacgaatacgataagataggggatatatgcacgcatagtttctattctcttgtcattccgagccgcaggcgaggaatctctctacaacctgccggttattcttttcccttgccgccggggcaggcgcggcccggggaaacgtgctgggtttgctcttttgccggccgcaaaggttcagccgggccgggtaggaaggcaaaagattcttcgctccggcttcacctgcgctctgaatgacagatcgagatgaagctcgctgcggctgtgctctgaatgacgggtttgtgcgtcggctatagacggggttatgtgttgcgtaaaaagtgtgcggggtgaaaagcgttaaaaagacgggccgttgcccgtcttttttctggattgcggcggaattatggtataatgaacccaaaccgcggcccgcaaaaagggtgaaaattagcggccgcgaaaagagagggaaggggagaggcgtatgtttaacccaaacgatggctttctatatgtcatcgtaaccatcgtgatcctgtttgtgatcatcgaatcgatctttttcctggtcaaggcctggcggagggccaaggcgcttaagatggacaaaaaactgctccaaaacacggtcgtatcctccgcgatctttaccatcgccccggcggtggcgatcttgctgggggtgatcgcgctgagcaaggcgctgggctttccgctgccctggctgcgcttaagcgtgatcggcgcgctgacctatgagaccacggccgctgccacggccgccgcggcccagggggtcaccctaggcaacctgatcaccgatccgcaggtgtttgccgcgattgcctgggtgatgacgctgggcatcatcccagggctggtgctggtaccggtattcagcaaaaagatcgaaaacgggctgacccgcatcaaatccaaggatcaaaagtggggagatatcttcctcaccggccttttcctggggatgatctccgcctttttaggcgtgatctttgccaccattggccaggggctggtgggctggataccggtgtttgtgatgatcgcctcggccatcatcatgctgatctgcgggcttttgcgcaagctgtttcagtggaagtggctggaggactatgcgctgcccatcagcatgctgggcgccatggcgctgagcctgcccatcaccaatctggtgacggccattgccggttaaaggagggaaagcaagatgaataccataagggattatcgggattctgtgcactttgccgggcgcatctggtccttcggggcgcttttaatgatgctgatggtgccggcggccatctgcatttactataacgcctggccggagtttaccgcggtgctcaaaggttttgtgggcgtagcccccatcttctggacggtgggcgtcatcgaagtgatcacctacgtgcccatgttgggcaccgggggcagctatctgggctttgttacgggcaatttgagcaacctgaaggtgccctgcgccttaaacgccatggaggcggccaaggtggagccgggcagcgaggagggcgaggtgatctccaccatcgcaatcgcggtctcggctatcgtgaccacggtaatcatcgccctgggtgtgattttgctggcgcaaatccggccgtttttggagtccccggtcatgcagccggcctttgacaacatcctgcccgcgctgttcggcgggctggcggtggtgtacgtatccaaaaactggaagatcgccctggcgccgctgatctttatggtggtgctgttcatctgcgtgccctcgctggccagctcggtaggcgtgctggtgccggtaggggcgctgctggccattggcgtggcccgcatcctgtacaaaaagggcgtactctaaataagattaaaggtaggcgaaaataatgggatggctgattttagtggcggtcattttgatattcctggccgtgatcctgatccgcacggcggcctttaagcccaaagcgcagggggctgcggcgcccgcgccggtgcaggtggatgagaaaaaggcagtaagcgacctgcaaaggatgatccagtgcaagaccgtatctttccgggagcaggaaaaggaagatagggctgaatttgacaagttccgcgcgctgctgcgcgagctatacccccgggtgcatgaggcgatgagcctggagcgcatcggccgcagcggactgctctaccactggaaggggcggggaaaaggcgcgccttcggtctttatggcccattacgacgtggtgcccgccaacgaggcggcctgggataaaccgccctttgcgggcgtgatcgaggatggtgtgctctggggacggggcacgctggataccaaaggcacgctttgcggcgtgatggagggggccgagaccctgctgggccggggctatgtgccggagaacgacatctacctggcctttgccggggatgaggagatcgccgggcctaccgcgccggccatggtcgacgagctggaaaagcggggtatccatcccgcccttgtggtagacgagggcggcgcggtggtggaaaacgtgtttccgggcgtaaatcagccctgcgcattgatcggcatcggggaaaagggcatgatgaacctgcgcctgtccttagaagggcaggggggccatgccagcgcgccgccggcgcacacgcccgtgggggtgctggccaaggcagtggtggatatcgagaatcatcccttccgtttccagctgaccaagcccgcccgggagatgttcgataccctggggcggcattccacctttgtttaccggatgatctttgccaacctgtggtgctttaaaccggtactcaatgccatctgcaaaaagagcggcggcgagctcaacgccctgatgcgcaccacctgcgcctttacccagatgcagggcagcccggcggataacgtgatccccccttccgccagtgtgggggccaatatgcgcctttgcggggcggatacgctggacagcgctatggattacctcaaaggcgtggtggataaccccgccattacctttaccagggtgcacgggatgaacccctcgccttacagccgtacgcaaggcggaggctgggagaagctgaaaaacgccatcaaccagacctggccggaggcgctgatctcaccgtacctgatggtggcctgcagcgattcgcggcattattgccgcatcagcgagaacgtgtaccgcttcagcgccatggcgctgaccaaggaagagcgcggcatgatccacggcaataacgagcgtatcccgctggagaagatcatgcgcaccgcccagttttacgtgcggctgatggggagctgctaaaaggggtagatgaggcgagaggaatacgctataataaaagagcacaaaaggcgcgctgcgcctaagagagaggagatttgcaatgaatgagaatgtaaaggcgccgggcaagacctggttgaaggttacgggtatcctgatggtgatcttcagcgcgatcgcgattatcctgctgctgatcagcctagctgcgttaggcgcgctgggcgtgatgggcggcggtgcagtggccggcgtagcagcgctgggcatgggcgcgctgatcatcggctttatcgcccctatcctggagtttgtgggcggcattattggtatcgcctttgccaacaagccggaaaaggctaacgtctgtctggttttcgctatcctgatgctggtgatggtggtaatcaatatcgttgtgggtggtttccagtggaccagtctgatcggcctggtgctgccgatcctttacctgatcggcgcggtcaagaaccgtggcgctgtggcgtaatcgcctgaatagagattaaaaaaggggggcggctgaacagagaccgtccccccttgtatgttaaaggaggcgcatgccatgccagtaaagtacaaagcgcctggcaagggctttttacaggtaccgggcattttgatgatcgttttttctagtatcctgattttgatcctgcttttgggcgccactgtattaggttcggtgggcgccatggccggcttggcggatgtggatatggccgaagcgatggaggaattgatggatggtgcgcaggtgatgctggacaatcctacggttcaccgtgaattgctggccctggggctggggatgatcatgatcgtgctgaatttgatctccggcatcgtgggcacagcgctttgcaacaagccgggcgggccggcggtggtctgcttgctctttgggctgatcctgctggctgggagcgtgctctccctggcgctgagcggctttgcctggagcggattgctggggctggtgctgcccattctctacaccatcggcgcgtgcctgaaccttttcgcgcgccggccggcgcgggatggggcgccgttccagtaagaaccagtaagaaaaagaggataaaattttagcgattttgtaattgcggccgggtttttccccggccgcaaaatttatcatacgaatttccatttttataggttggcagattggcccattatgcgctataatgaaaaaaagaaaaggagcgtgatggacatgatccaggtgatctatggcaagaagggctctgggaaaaccaaaaagattctcgacttggccaacacactggccgctcaggtgaaggggaacacggtttttatcgacgacgatcagcgctatatgtatgatctaaaataccaggtcaggtttgtcaatgcgggggaatacaatatcgaggaccccaagatgtttttaggtttcttaatcgggatgatggctaaggactttgatttggagcttctgtttgtggatggcttcctgcgtatcgtcaacgcgcagctcaaagacctggccgatttttttgcacagctgagcaaggcttccgagcagcataatgtgcgcgtaatcatgagcgtcagcggttcggaggaggaccggcccgccttcttggacgagtatctgttgaaggattaggccttaaagttgggagatatgcgggcccttgctcttattaaaagagggcaagggccttcactttagaaaaacttggaggaagaatatgcattaccaaagcacgcgccaaagcgccctttccgtccctgcggcccaggccattttacaggggatctctaccgatggcggcctttttgtgcccgaaacactgccgcagctgacccaggaggatatcgcggcgctgtgcgggatggattatatgggccgggccaaaaggattttgggcctttttttgacggattataccgaggcggagatatccgctgcggtagatggggcgtacgcgtccggcaggttcgaccacgcggatgtggcgccggtgacggccctggacggggcgctttccgttttggagctgtggcacgggcctacgctggcctttaaggatatggcgctgcagctgctgccgcggctgatgccgctggccatggaaaaggccggggacggcaaacaggtgctgatcctggtggctacctccggggataccggcaaggcggcgctggagggtttccgcgacgtggcgggcacccgcattgcggtgttctaccctgaggagggggtggccctggcgcaaaaactgcaaatggtgacccaggaaggggacaacgtacatgtatgcgccgttaaggggaactttgacgatgcgcagaccggcgttaaaaagatctttgccgatgatgcgtttaacggcgcgctctcgcaaaaaggatgggcgctaagctccgccaactccatcaactgggggcggctggtgccgcagatcgtatactacttctccgcctatgcggacctgtgccgccgcggggacatcaccgtgggcaaaaaggtgaatttcgtggtgcctacgggcaactttggcaatatcctggcaggttattacgccaagcacatgggcctgccggtcaacaaattggtgtgcgcctccaaccgcaataacgtgctgacggactttttcgataccggccggtatgaccggacgcggcctttctacaagaccatgtccccctcgatggatattctgatctccagcaacctggagcggctgctctacgccatctgcgataaggatgaggcgcaggtcagggcctggatggcgcagttacaaggggaaggcgtctatcagatcgccccggaacaggcgcaaaagctgcgccaggagttctgggccggttgtgccagcgaagaggataccgcccacgctatggctgctgtgttccagcataccggttacgtgatggatacccatacggcggtgggctattccgtttatcgggattatctgcgccaaaccggggacgagacccataccgtattggtctctacggccagccccttcaagttctcccgggatgtgatggccagcctctttggccccgcgcaggcccagggggatgagctggacctggcgcaaaagctggcccaggccactggctggcgctgcccggagcagatcgccgcgctgcgcgagatgccggtgcgccatgagggcagctgcaaaaaagaggagatggagcaggatcttctgcgctggtttgcctaaagggccttttcagacacaaatgcaaggcgcatcgccccaaaaggtgggcggtgcgtctttttatctgtgggcagacgcttacgtcaggcgcggcgggatgagcaagaactgcccgaaggagaagaagggctggcgccctggcgcaagttcgattataatagtagagagtaaaaagatgacggcttgagcaaaggaggcatgggcgatggcgcaggaaaggcgaaaggcaccggggcgcatgtttttgctggtcacgggtattatcatggtgattttttccgggttggtcatcatattatgcatgctctatcttccgatgatgggcatactttgcgggatgatgggggcgatggagccggaattggtacaaagcctggattatatcattgccacgaacctggtttgggagttgctgattacccttggctgcagcgcgctgttgcaaatgacctgcgggatcgtaggcatcgtatgcggcaagaagccccgcgccgccgcggtctgctgctggctgggcgcgtcctatacggggatcgtgctggcgcagagcattgcctatggtttttttaacccttttgggctgcttgcgttcatcctgcctgcgttctatttaacgggcgcggtgttgaacctgctgcaggctgtacgggaaagcggggtggacgcatgaaaaaggcggcttgcgggctgctggcagcactgctggcgctcaccggctgtaccgggcaggacagtgcgcttcccacggctgcgccgactaatacgccaagcgcagcgcagagcgcgcccgcgcccacaccggtaaaaaagcgggtggcacagcggggggattttgaactggatgggccggtgctggtagtgggcgatatgcccacggaagacgtagaaccgggggagaacgtgctttatagcgaccggacctatcagcgcgagaccgtgctcagcggtgagatatacttggtggaggaccggctgcaaaaggctgacccgggacttggcgggctgcacggggctattgaaaagctggagggagaatgcctggatatggagctgacccgggatgacgaggccagcgaccgcaccgggctggattgtttccgcatggtgtatctcacggataaggacgggatgagctaccgcaataccgacctttatctgcaggcagaaaattgggattttcgctttcacgtggctgtgccggccaaagaatacagcgattatgcggatctggtgaccttctggatcagctcggtcgaggtgattgaggattcgcggatcggctggggaaacagctcgcccgaaacgccggtggacgaagctccgccggaggatcaggacgcgctgcaggaaatgagcatgatcatgaactttgccgctggcggcgtgtgcgatacggagtttcgcgcgtatccaagaggcagccagccggatagcgacctggtttggctggtgctggcggagtatgcccaggtgctcagcgggtttgagatctaccccaaggaggaggggcgggtttacctgacccatgaggaaatggcggcgctgtacgaccggtgttttggttctggcaaactgcccaaggtgccaagctcgctgagggcgagcggcgcggtagcgcagaccgagcagggctatacgctggcccccatgaatcggatcaattacgtcacttcctttagcccgatcagttacagcgtcagcgaagcgggggactatctgatcagcggcagctttatgagcggatattccggggatgagcagcagctctggcggcagggaaatatcacactgcaccgcaacgagggcgatgagatgccactgtaccgtatcatatccatcaacaccaattattgagaagtaatgtggagaaatttagccctatcaaagcagctttgttataggcccggctgcaccgggtttgttataatgagaaagaacaaaaaagggggtaacaacgatggcttttgatgcgtataagtttaccgtgccggagaacaaacgttttcgcgttatcgtcaatacggattgtaagaacgaggcggacgaccagttcgccctggcccaccacctgatgacgcctaagtttgacgtgcgcggcattattgccgctcactttgaggccaaggctgatgagggcaagggcgagtccatgcaaaagagctacgacgagatccttaaagtgctggagctgatggaactgacggggcagtatccagtgctcaagggcgcgccagggccgctgccctatgacccggctaaggcgatccgctataacgaggggccggagattccgctgatggagcagccgcagccggtggtttcggaaggggcacagttcatcgtggatgaggcgatgcgggaggatgaccggccgctgttcgtggtcttcctgggcgccattacggaccttgccagcgcttacctgatggaaccgcgcattgccgggcgtttgacggcggtgtggatcggtgggggcgagtacccggcgggcgagttcgagttcaacatgtatcaggatattcaggcctccaacatcgtgctgggttcggagatcgacttttggcagattcccaaaaacgtgtataagatgctgcgcgtgaccttggctgaattgcagtgccgcgtggccccgcaagggaagatcgggcaatatctcttcgagcagctggtgcaatataacgacgattatgcctggcagcagcattggcctcagggcgagagctggaacctgggggatcagcccacggtatcggtcctgctggaggcgcatgagtgcgagtgggaatggtggccggctccgttggtcagcaaagatatgtattatgtccaccatcagaacaaccggccgatccgggtgtttaagagcgtggattcccgcatgacgctggaggatttctactgcaagctccagctgaactacgggcagaaatagccgcagctgtggatggacccgccccggtttcggggcgggtttattatcccttaaaaggaatgcgtgccgggcatatttttttgcgtttaatcggcgggaaatgctgcgtagctacttgacgaggcagccttttgcatgctataatttcgattgctggttgcttgattttggagagatggccgagcggttgatggcgctggtcttgaaaaccagtgatgcctttgggcaccgggggttcgaatccctctctctccgccaatcttataaacatgcctagtgcatcatttaaatttcagcgtggagaagtactcaagtacggctgaagaggcgcccctgctaagggtgtaggtcgggaaaccggcgcgggagttcaaatctccccttctccgccacgtcggaacgagttacgctcgttccgattttttattttataaaaaatcagtcacccgctccactgttcctcctctttcgaaaaaagtcacgctcagctcgcctgttcgcttgcaagcgcgctcacaatggctcgcagtcgctaccaactttttgcgagttcgagagagttcaactcccacctccgaaaatcccaaaatatctttttcaggtggctttaatggaaaagcagagcttgaacggacgcgccgggtaccggcggggcaacgcctgcgagcgcgcctggggcgatgaagcgagcaggggttggcgcagcggtcgaaaaaatcgaggagagcgccagtccgaggattttttcgggtaccgcaagctggggcgtagccttcaaatctccccttctccgccacgtcggaacgagttacgctcgttccgattttttattttataaaaaatcagtcacccgctccactgttcctcctctttcgcaaaaagtcacgctcagctcgcctgttcgcttgcaagcgcgctcacaatggctcgcagtcgctaccaactttttgcgagtttagctccaacctccgaaatgtcaaaaatatcttttatgtgctgaggacacgtcgccgcaagctacatatcgcttgcggcgacttttttacaaaagtcatgcacgtttattccgctgtgcccctttatccgaaaaaagtcacattgtaccttcgctgcccgcttgtaaacacactcgccgcgctttggctttctaccaaccttttgctaatctactgaaaatgattttgaacgcgacgcctcagcagacttcatgaacccaaaacgcgtatttttcgtgcccaagcggcaaaatgtttgaataaatattctaatttaacaaaaagtaaaacgagtgtttattttttaggctgattatcgtataatatttctcggtgatttgaccgataaatgcgatgttgcaacgatccacctggactgtgggccgtcgtttcgcgatgcgtttatcctacaagagagctgatacttccggctatagggtgcgagagcagcctgtaaataagcacagattaaaggagtagtgtacgatgaaacgagttgcaacagtagttttggccctggtgatgatgctgtccctggctgcgtgctctagcaagcctgccaccgtgcaggattacctggccaagcccgaggtcaagacccaaatcgattccatgatcgattctctaaagggctctggcatggatatcgaggtgaccggcgagggcaataagctgatttatacctatacctttgacgagcagatcgacgcttcggatgccatcaaagaggcgctggaagatgctctcagctctcaggaatctaccttccagaatgtggcgaagtccatcgagacggaagccaaagtcagcgatccggtggtcgtagtggaatacctcaatgccgatggcagcgagcttctggttaaggaatttaaggctgaataatttaattacacattttatggatggacgggttctaacccgtccatctttttattgtcccgatgcgtccaggggatggtttatatcgcaccgtttgccggcctgcgcttcttaaacagatcccctcattgttggatgcgataagcctcacgatacggcgatgaagggaataatattccgttttttgaatttttataatatcctttataattacattttacctcgaaaagtcgcattttcaaattttaacgctatttttgaataatacttgtgactgcgatgaataggccgttagaccgtcataaaaatgcgtaaagattccatataattcttgcaaaaaaacattgacgaaaagtagttttctcgctattcttttacatattgatgttgaaaaatctgtatatttatgtcatgtataataaatttatgaatttggatggttaaagatgcagcgcgtacaaaaggcccagatctattatcccagaacataccggcggtttaaggaggactacaagaaccagtggctgttcattctgctttgtgtggtgcctagccttatactactgctggcgttttatcctcaaatgaccgagctactcagccgggcggttagctattgcttatctgaggtgatccccgcgccgctgcttggcgttcaaacgtcggaatacattccgctgctgggtggggtttcgtttgtagagctgccctctgtggcccctacgtttcctttttgcgtggccaatttgctggtcacctgcggaatgctttggttttgtttctctgcaaagcgcaaggggaagccccttgcgatctttttttcgattatgctgttgatacacctgatcgcctgcatctatttttcctttgcgtcggatgatttcccctacagtgccagcgcgtattccgagctgtatatgaagcagcaagtggggatatggctatcctttaccgtgattgccggctttgtgaccgggtttatgaataacggcagcataccggcccgttgtctgacgtttttcggcatcatgctgtattctctgattttcggcagcgtccgttatctgacgtttttgtacattatatatgcggcttcttcgttatacatgccggtgatgttcttttcgctggggccgttctttgactttttatacctcgttttcttttacggtgtatttattaagtacgtggtgcaccgggtgaacacgggggaaaggagatcggtttggaaatggttttaacgatcttaaaggtgtattttgtatgcaccgttattctgatgatggtttatgccgtgcgccacgcgatcttctcttacaaccggatgtttggccgccagcgcatgtattacagcgatatttttgacagcgatatgccttcgatcaccgtattgatccccatgcacaatgaggaaaaggtgcttacttatgtgctggacgccctgctggcctgcaattacgaccgggaccggctggagatcatccccatcaacgataattcctccgaccggacggcggagatgctggaagaatatcatagccggtacccctttatccggccgctgcaccgctttgagggggaacggggaaagccggccgggctgaacgaagccatgcgcctggcgcggggcgatatcatcatcgtgtttgacgcggactacaggccgggcaaagatctgctcacctccctggcgctggcgtttcaggaccccgaggtaggcgcggtgatgggccgggtcatcccctacaatgtggataccaatacgctaacccggcttttgaacgtggagcgctcgggcggctaccaggctgaccagcaggcccggtacaatctgcgtaccgtcccccagtacggcggcacggtaggcgggtttcgcaaggcctttttgctggagaccggcggctttaacacccgcgtactggccgaggataccgagctgacctaccggctctatacccatgggtggaaggtgatttacgccaacagtgccgagtgctatgaggaagtgcccgagacttgggaagtacgcggcaggcaggtgcgcagatggtccagcgggcataacaatgtgatgttccgctactttttccgggtgctgttttccaaatacatgagtgtgcgggaaaagctggacggcatgctgctgctgttggtgtatgcagtgccctttttgctggccctggcgctgatcgattctgtggcgctgttcttcctgggggagatgaacgtgtttgcgggctggtgggcggtgtttttcgtaggcgcttacaatagctatggtaattttgcgccgttttatgagatcgccaccgcgctgatgatcgacggagtggagatggatgtaaagctgatgccgctgctgacctttaacttctatttctatatgtggaatatcgggctgggctttttggacgccattgcggacctgttgacgcatagaaaggtcaagtgggccaagacggagcgctttgccaaacaaaaggataaggagggcgcggtatcatgactgcggtgatcgtaggcgccatcgtactgtttatcgccatgctgcttttcccgctggtgatgagcgcgcgctcgctgaaaggggagaaggccgaggcgctaaaaatcaataacgaccgggtgcgcaatccccgctatttcggcatctcttttgcggcgctgatggaaaaggggctggcggagtatgacggtagcggaaagatccggatgtccaaagaggaagcgctgatagaggcggataagctggaagccttgcccatagaatgtgagagcatcgtttacgcaaaggaaaaggagtttcgcccgccggcgggcacgatcttccataaagagatctatacctgccaggacgcctatctggatgggatttacgaactgcgcgccatctatggtaaaaaggccgtgacgctgggcgcgggcaccatgctgacccgatgggcggacgcgctgggccccttacgcgtggaggagcacgctaacctgggcatcagcgccagcagcgccacgcagctgaccgtggggcgggattgtaccttccgcaggctgtatgccccttcgatcagcctgggctggcccgcagagcagggacagacggaaccggaaagcgccgcggcgatggtggccgtggctttaagcgatacggtggtgcgcaatatacaatacgtggacgacgaccagacggatgaaaatggagagctggcggccacggtgatcagcaagcatgccgttacggtgctggaggggctgacggtgcgtggccacatccgctcgcacaagtccattactttatatgacggcgccgtggtttatggcaacctttttgccgagggcgatatttacctgggcgagaatgtaaaggtgtacggcaatatctttacgcaacagaagatcatcacccagcgcggcgtgcagatcggccagtttggcgagatcaagtcggtcatcgcccgggacgagattattttcggcgcggactgcaaggtttacggctatgtgagcagcgagacccggggccggtgttgcccggatgcggatatggtgtatcttacccccgaggaagaggaagagctgcggcaaaagtggaggggcaacctgcgtaggacggccgtattgccggtgatggaaaaggcggtgtttaaggatgccgcggagtttgacgaaatgagcacggaggtcttccgcaaaaaccgatatttaaaagaaacggtaatcccggagggcgtgcaggtgatccgccggggatttttcttcggctgcgaaaatctggaaaaggtcgtgctgcccaatagcctgaaggagatcgaagactttgcattttatggctgcaagcggctgagcaagatcgacctgaccgcctgcgggcagctgcggcggatcggcgaatcggcctttgaaggctgcgcggccctaagggctgtggcgcttccgggcagccttgcacagttgggcgcggctgccttttccgggtgcagcgcgcttggcgccgtccagaatctggagcatacgcacctaacgcggctgcagggccatgtatttttggattgcgctgcactaaaatctgccgccctgccggagggtatcggtggcatcggcatcagcgcgtttaagggctgcaaggccctgcgcgagatggtcctgccgcgcagcgtcagccacattgaggcgttcgcctttagcggctgcgaggctttgcagcagatcgtactgcaaggcgagctggcgcagctggacgaaagggcgaaaaaaggcctgccggaaggcgtacggatcctggcggcggaaagcaaaacggcggccggctaatttgaagcgccgcgggccgaaggaggatggatggtgaatagaacaaaggcaacgctgctgagcctgttgctgctgctgggcgttgtggggatcagcgtgggcgccgccatgctgaaaaaccacatggtcgatcaggccgcgccggcggtagcatcggtacagccgctctatggggtgcagggcctgccctatggcagggcgctgtcccaggagatattggcggtggatgaagcgaacgtgtatttttctgaccgggtgctggagcggttttacaacgatgaacaaggcaaccagcgcaccgcgcagaggatcgccacctttttcggggccgtacctgagggcgtgaacaaaacggtgctgcttttcccgatgcggatccacatggaaacggagtacgcgcagtataccgacgacgtggccccggcgatggagcagatcgccgccgggctgcccgaggatgtggccgtgctggatgcgacggaccgcctgtaccagcaccgggaggagtacatctacttccgcacggatgattgcatcacggcgctgggcggctactatggggcgcagttgctgggggaaaagctggggcttaatatgctgcagctgagcgattatgaagaataccggttcgagtccttcaagggcgtgctggacgcgctggatcaggcgcagatcgacgaggactgcacggattatgtggcctattacctgcgcaagggcgcggcaaactggcagacggtgacggtcagagaggggccggatcaatattcggagcatgaatcccccgcggtggcgctctcccgccggggtacggatatttttataggcgggtactattcccattcgatccttcaaggagatggcggcaacgggaaaacgctgctgatcgtaggcaactcggatgccaagttctttgccccgtggttcaccccgtattacgatacggtctatctggtcaatgcagagcgctatcagggcggccaggagggctttgcgaagatttttgaaacgtaccaggtgagcgactgtatcctgatcgagagcgccagcaagtttggggatacggcgttgaaccagcgcctagcgcgtttgggaggggggaggtaagcgatggagagcggcaatatcttatatgagatgttggtgtacctgggcggacagatgggggtcggcgggtacatccagcagggtgcggccctgctggagggagcgatgctgcttatcgcgctgttgacctgttttttcgggtataagctgttccgggtctggagcgcggtagcggcgtttttgctcacggcgatcggtataacggcgctgatgcaaggcgtagcggatcggggaacgatcgttacggcctttgccatcgtggggttgataatggcctttctggcctttcagtggcccaaagccagcgcgtttctggtgtgtggagtgatcggctacggcctggccggggcgctgaccccgctgtggtgggtgcggttattggcgggcgcggtgctggcctgcgccaccatccccctttccggatggctgatcgtaggggctacggcgctttggggcgcctttacgttgagtgccggcgtcctggcctatctgggctatcccacaggaacggcgctgcaatgggtgcttaccctggtcatgaccgggctgggcgtctttgtacagtacaaaaccaaccggttggccctggccggccaggccgatgcccgggcgctttgggccaggtggaaccggaagaaaaagccgcagggataggaggggctatgggcaataccgtttttagaaaggagatcaagtacctgatctccgtgcaggattacctgctgatccagaaaaagctggcctgctttttacagccggatgcgcatggcggcccggaaggatacatggtgcgctccttgtattttgattcgatcaacgaccaggacctgtacgataccctagacggctgcatggaaaagcgcaagatccggctgcgggtatacgatgcgcaggcccggcaggtcaagctggaatacaagtgcaaatccaatacggacggggtcaaaaagacgctgaccctctcccgggagcaggcccaggatatgatggcgggcaactacgggtttttggccgggatggaccagcccctggcgcgccacttatatatccgcctttgtacgggcgcctatacccccaaaagcgtggtgcagtactggcgcaaggcctacctgtatccggtaagcgatgtgcgcatcacctttgatacgcaggtagcggcctccaacgtgccgagcagttttttggatgcgcagcccagcctgatccccctgctgcccctggatacgggcgtgctggaggtaaagtataacgactttttgcccggcgtattgaaagagctggtggcgcggctggaccggttgcagacctccaacagcaagtacgcccaatccagattgttgtaaaaacaaaagcgccagcgggcgcggggatattttttgtcacaccgccagcggtttgcgctgcaaacctgcccggcaataaaaatgatggcctaacaaaattacggagaggataagaaagatgaaagatttgatcttggagagcctgagcaatacgggcgcgctggaactgagcacgattctgctgaacaatggcgtgaccattatcatcgccctgtttatcatgttcacctaccgcatcacctacacgggggtggcctacagccgtaagtacaatattaccctggggatgatcagcatcatcaccacgctgatcatgagcgtgatcagcaacaacgtggcgctttctttgggtatggtgggcgcgctgtccatcatccggttccgtaccgcggtcaaagatgtgcgggatgcggcgtatattttctggagcatcgcggtgggcatctgctgcggcgtttcccagtatattctggcggcggccagctcggtggtgatcctgctgtttttgatcgtctttcgccagatcgggccggatggaaagatgcttttgatcgtgcgctgcgatatggccgcccaaaaccgtgccgaggcgatggtgcttcagcactttggcaaggctgtgcgccggcggatgaaaaatgcctcccaggagcattgcgagctgatctatgaggtggggaccaacgccatcaaaaaggcggacgagcgcgcgcagatcgacatcgtacaaaggatgatgaagatcgagggcgtgcagaacgtgaacctggtggaacaggcggacgatatcagccgatagcggataggagtaataccattgaaaaagataatgtgcggcctgttggcgtgcgttgccctgatgggagcggtcacggcggcgaatctgctgtctgagccggggcaatcctccgttagcgcggcacaaagtgcgcagagcactgcgcaggagcagcgccagcccggcgagctgccggtattgcgtatcgatacccagggcgagcgcatttataaggagagcaccacctgggccgatgtcagtattgaggagcaaagcggcgggaaaaacgcgtttgaaacgctggccacggtcaagctccgcggaaattcttcttactacatctttgataagcgccagtaccggctcaagctttacaaaagccagaccaatgaccgggattacggccttttcgggatgggtgaacacagcgagtgggtgctttacggcccctttttggatcgctcgctggtgcgcaataaattgatgtacgacctttcgcgggagataatggactgggcgccggattcgcgatattgcgaggtatatgtcaacggcgagtaccagggcgtttacctggctgtagagccggtgaccaacgggaaggcgcggctgaatctctacgagtttgggctgctcaccggcgaaacggtctatgtgctcaagcgggacaggagcggcactgaggagaacgtgatcaacgattacggaaccagagagggtaagaccgataacgagttgagcgtggtctacccttccgcatccaaattgacgcagaaccagatgagctggatcgaaaaggacatcagcgcctttgagaaaaatctgtattccgatggatttaaggacgctgccaggggctatgccgcttatatcgacgtggattcgtttgtggattattacctcattaacgagctggccatgatcccagacgcgacccacctttccacctacgtctataagaatatcggcggaaagctcaagttggccgtgtgggattttaacaacgggtttgacaattacccctggacggattatgagacggatcgcttttttgtggtggatggcaactggtacgaccgcctggtgcaggaccgcgcttttgtagataagatcgtggcgcgctaccgggagctgcgccagggccagtggtccgatgaagaactgcttgccaggatcgatggatatgtggaagcccttggcgatgcgccccagcgcaattttgaggtgtggggctatacgtttgaggaagacctgctctcaaaagacgagcagggcaacagccgggaccctgaaagctttgaggatgcagtgggcgaccttaaagcatgcctgcaggagcgtaccgcctttctggacgcaaatatcgaccagctgtacacctactgcgtggatgaataaggaggacacgatgccaaagaaaaaagtattgcttatcttcgggacgaggccggaggccattaaaatgtgcccgctgatcacagaactgcgccgcaggccgtcgctggaggtcgtggtgtgcgtcaccgggcagcaccggcagatgctggaccaggtactggaggcgttcggcatcgagccggagtatgacctgaatatcatgcaggataaccagagcctgtttgacgtgacccagcgcatcctctccagcatgcaggcggtactggacgccgaaaaaccggatgtggtgctggtgcacggcgatacgacgaccgcatttggcacggcgctttgctgctattaccgccaggtcgccgtaggacacgtggaagcgggactaaggacgtataagatctattcgccctttccggaggagtttaaccgccaggccatagggcttgtggccggctatcattttgcgcccacccaaaccgcgcgggacaatctgttgcgggaggggaaggaccccgggcagatttttgtgacggggaacacggctatcgatgcgctgaaggacaccgtgcgggaggactatacccatccagagcttgagtgggccgcgggcagcaggctgattttgatcacagcccaccgcagggagaatatgggcgagccgatggagcagatgttcagagcgatacggcgatgcgttgaggaaaacccggatgtaaaggcgctttacccgatccatatgaacccgagggtgcgccagacggcccggaatattctgggtggctgcgagaatatccatatcattgagccgctagatgttttggacttccacaatatcatggccaggagttacctgatattgacggatagcggcggtatacaggaggaggccccgtccttaggcaagcctgtgctggtgatgcgggaggaaaccgaaagaccggagggcatcgcggccggcacgctcaaattggtaggggttagagagcagcccatctacgatgcctgcacgctgctgctaagcgacccggaggcctaccagcagatgagccgggcttctaacccctatggtgatggatatgcctgccggcgcattgccgatgtgctggaggggcgcaaaatacagtaagggaaaagagtacatgaaccgatataggacaaggcgaggccgtcttttaaccggcgccgtggccgtcgtgctggcggtgttggttatcgccgcggcggtatacttccacctggccggggcgcgcaaggcggagctgtacgctaagcagcaatactacagcgcccttgtgcaaagcgaggccgcctggctttgcgagatacagctggaaaacggggcgctgccctttcgcggccaaacggacggtacggccagcgtaacgccgtatttttcggatatcgcggcatgggggctgctcaaggcggaaaaatatgacgctgtaaaggcctatatgcaatggcattttgcccacctcaatacggcccgggaggataaaaacggcattgcaggcacgatctataactatgaaatcgaggtggccgagggcaccgtgatgggcgagcagacggaccagagctacgattcggtggactcatatgccgccacttttttgacgctggtctgtgcctatgtccaaagcacgggcgatcaggaattcttgcgtcagcatgcgcaggagtttctagccgtattggaggcgatggagagcaccatcgaccgtgacggcctgtcggtcacaaaacccagctacccggtgaaatatctaatggataatgcggaagtttatgcggcgcttaaaagcaccgcggcactgctgcaaaaatatccgctggagggctcaccccagatactggagcggatcaacggacgggtggccgccatggaggacagcctggaaaacctgctttggaaccaacaggagaaccgctatgagatcgggctggacgacaagggcgagcctttgcgctttcagggctggcacgaattttatccggacgcgacggcccaggtgtttcccatcctctttggggtgatccagccggaggacgagcgtgcgcaagcgctctatgagcagttttgcaccgcatatgcctgggaggatatggcgcactatgaaacggataatgccagcttttactgggggctaagcgcctatgcgggcgcgttgatgcaggataagccgcgcgtacacagctacatggcgtattacaacagcaatattttgccccggcgggattatccgctgtattgcgcggatgccgggtgggtcattctggcctgtgatcagatggcggatgactatcaggagcaaatgcaaaagatcgatccgctggggatcgtgccggtccattagcgcattggggttctcaaatgatatttgaactaaaaaccatccctccacgtatgcggaaggatggttttttgcacaggtaacagtacgccgtaagccccaaactaccgcctggcgccgtgccgacgcaggccccaccgccccagtgccagcagcgcgcagccggtaaaatacatcaaaagatcctgcacgtcaaaggtggcccccagcagcgcgcccagcaccggcacttgagataaccccagcagccgggccagacccaaatactggacgcattccaccgccgcggcaaacagaaaaacatagaggggcaaaagtggaatatcccgcccggcacaggcccgtaccaggcagtacaggccccatacagccagcatatccccaagataaggacggatgaatccatcgtgcacgtataggtcgatccccacctccagggcgaggatcaggataaaggcgagcaggtaacgcaagcgattgttcatagcggttcctcctgatggctcgggcgatgcccgtattgacgaaaggctgcctttcgcataaactgaaatggcgggggagatgcccccgttaaataagggagggatctccatgacattttgggcaagctatggcatgccggtgggctttgttttggtgattacggtactggtgcccctggcgctagtggcctttgggctgatacgggaccgggccaatcttttgccctttggctttggcgcgctggcctttgccgtctcccagctggtattgcgcctgcccctgctggcgctggtgggcagctggtttacagcccctgccgcgcagctttcggtagggtatgccgcatatgtggcggcaatctccttttcagccgggctgtttgaggaatggggccggttcttctttcttaaactgctttcccgcagggaaaagctggatggttacgatgcgctggcctttggcttgggccatgccagctgtgaagcgctggtgctggtgggggccagctacctggtgttgctgtgcacgccgctagggcagctaaccctctcccagagtgcgccggcggatattgccatcgccgggatggagcgggcactgagctattttatccacgtagggctgactttcttagtcttctccgcggtgattcacaaccgcaggcgcaaggtctggggcgcggtggcgctgcacggcatcgtcaacttttttgcggtggtgctcagctcggtgttctcgggtaacatctggccggcggagtgctggatgttcttttgcgctattgctgcggggttgtacgtgctgctgcgcctgccggattatctgccgggtcaccctaaagcctgacagacggctggcagcactttttacctattatatacgtacatacatctgtaatactaataggaagcgatttgccctgcttttgaggggaggcgtgcccatggatctgcggatggctactccagcggatgtggaagcgatcctgcatctgatcgcgctggcccgggagtgcttgcgccgcctgggcatagatcagtggcagggcccctatccgggccgggagacgattctggaggatattggtaaaggcgcagggtatgtgctggaacgcgccggcgtggctggctatgtggcgatcctgcctggggaggagcccacttaccgccagatcgaaggggcctggctgcagcagggcccttactgcaccctgcaccgggtggtagcggatacacagcggcgcggacaggggctaggcgcctcccttttggcagaggccgccgcattggcacaaaaaaggggcgtagaggctttgcgcgtcgatacccatagggctaacacacccatgcgccatttgctggaaaagcagggttttgtgccttgtgggcagatcacgctggcggacggcgcaccccgcctggcctatgaaaaacgactgtagcgccggataagcaaaaggcagaggattatattcctccgcctttttggttctgctttaaagcgtatcccgctcgggcggcagggcgcggcaaaaggccggcaggtctccgtgggacaggtgcactggccgcaatagtacgtgcagctgcctgcgcttggggtaaagccggtgctggggcagcggctcggggccgcagctgttggagccaaggcccccctgggccgcgtccagcgagaggatgacctgctcggtacgcgccaaagaaacgttatgcgtggccttttccagctgtgcatcggtatggtgccgagcggagaactcaaagggctgccgggcgatcaccgcaagacccaggccgtggggacttaaaagggccagcatgcgggtatcgtaatggttgccgtactcctgcgggcggatataatccacatactgctgggatacggtggagcgccaaagcccaaaggaggcgttctcctttaagtcgcaataggtctgcccggggccaagacccagataggtcaggttctccagggtgggatccagcgccagcgtcacgcccatgcgggggaggtagggcagataatcctgcgggcggaagtccaccttcaggtcaatatccccgttaccgtagaccgtataggtggagatgatgtccgccaccggcggacaggccgccgcggccagcctggcgcaggcgcaaacggtaagggtgccgtccttgttatagtgccaggaacaatcccgtttgcgaatctgcaggcggtcaagccccgccttgcgccacatctcttcgatggcatgggcgtcgttatctgtgggcgcgcgccagaagttaggcgtcggcccctgggcgatcagatccagcccctgatagcctaacgcacacaggttgcctttcatcaggtcgaaccgggcggtaaagtccgtaccggtcacggtcagaatgcgcccgtcagactgggtctgcatgctgggcagcgcggctaagggcagttggggcgctgcggcggtgtccggcagcaggaattgctggaaagccacgcgatggccggcatgtgcccacagggtatcctgcgccagggcaaaggatacctgcagcgaccagacgccgggtatgggcagccgctcggggaagggcagctccagctcccggctctccccggggccgatgtacagcggcgccagcgcgccgctggccacggcgcgcccatccacccgcaaagaccagctgggggtcaggtaccccagatcccggaaaaagtggcggttttccaccgtgatgcgcccctgctctgggtgtgcggcggtgatgtgcaccggctggatgatccacttgtaggccttcaggctctcatggggcacccggtccggactgcacagcccatcgatacagaaattgctgtcgtgggggtattcgccaaagtcgccgccataggcaaagtgactggcgcctccttcatcccgtacgcggatgccgtgatccgcccactcccatacgcatccgccgatcagccggggatagcggtaaaaggcatcccagtaatcctttagatgcccggggccgttgcccatggcatgggcgtattcgcactggaagaagggccgcgcgtccttgacctgggtgccctggcggatacactcctccagcgttgcgtacatacggctgacgatgtccagctctgccgagtcgtatcccccctcatagtggatggggcgggtgggatccagagaacgaatggcctgagccatggccacgtgattttgcccgtgaccggactcgttgcccagcgaccagatgatcacgctgggatggttgcggtcccgcaggaccatgcggtgcgcccgctccagataggcccgctgccaggccacatcgtccgagatggccgaaacgttgcccacctcttccatgccgtgggtctcaatatcgcactcgtcgatgacgaacaggccataccggtcgcaaaggtctaaaaagcgggggtcgttgggatagtgggaagtgcggaccgtgttgatgttgtactgcttcatcagccgcacatcccgctccatctcctcaaaggtaacggcgtagccccggtcgggcgaaaagtcgtgccggttcacacccttgagcttaacggatacgccgttgacccacagctgcccatcatgtacggccacctctttaaagccgatgcgtagcgggctgatctgctgcaggccgcccgggccttccagcgccagcaccaaagtgtatagggcgggcacttcgcagttccagggcgtcacgtccggcacgcgcagggtcatctcctcctgcagggaggcaaagctgccgctggcagccagctggccccggggcccgtacagtttggccgagagggtatagccggtggtatccttatttccggccatggccggggtaatgtgcagcaccccgtcgcgcccctcaaaagcggtgcgggtatagacgtccgctaagtacaccggcccttgggcggtcaggtacacatcccggaagatgccgttcatccgccacatatcctggtcctctaaatagctggcgaaggaccactgaaacaccaccacgtccaggtagttatccccctcgcgcaaaaaggcggtgatgtcaaactcgctgggcaggtgcgccccctggctaaagcccacgcgggagccatttaaatatacgtagaaaaagccggccaccccgtcaaagtgtaggtgcacccgccgcccggcaaaggccgccggcaggcggaaagcgcgccggtaaaagcccaccgggttctggtccggcacatagggcgggtccaccgggaaaggatagcggatattggtgtactgattgcggccgtagccctgcatctgccaacaggagggcacgggcgtttcatcccattttagggtctccacagccgaggtatccaacacctctgccggagaaaagccaccggcgctttccgcgtagcggaaggcccacacgccgctgagcagcttaaaatagggcgatagttcccgctggaaggtcagcgccgcctcctctcgggcatatggatacatcgtggcgcgggagggcagccgcccggcggaaagcactgcgatattttccagatcttttgccattttttctcctcctcataaggcccgcaggcctttatcttcacatggttttggggcgcacagcatccggcgccctatcttctattatagggggtatccccgggcagggcaaggcgaaaaatggggatagcaggcgcgtttgcggggagcattcagggcatggtataatagtggcggatagcaagagcgtagaggccttacgcccatccgcacaggaggccccagcacacctttataaagcgtcattcagagcgcaggtgcagccgcggcgaagaatctccggcattggaagagggcgaggattgacgcttacaggccttcggccgtggcggtctccatgagattcctcacgatgctcggaatgacggggaaaacaagcgggttctgggccgccccctgcggcaggccgggggaaaacggtagcaaatggaggggcgccatatccgtatgcccatggaaaacgaattgggggagtaacgaaatggggaagaccttggtggtggcggagaagccctccgtcgccaaagagctggcgcgggtgcttaagtgccgcaagtccggcgaggggtgcctggtgggggaggattatatcgtcacctgggcgctggggcacctggtggggctgaaagagcctgaggagatcgatgagcgctgggcccactggtcgctcaaggccctgcccatcctgcccggagagatcccctgcaaggtgctgcccaaaacgcgcaagcagtacagcgccatcaaaaagctgatgctaagcgacgaggtcgccgacctgatctgcgccaccgactccggacgggagggagagttgatcttccggctgatctacaaccaggccggctgccgcaagccctttaggcgcctttgggtttcggctatgacggatgccgccctgcgtgaggggctgcaaaacctgcgcgagggccacgaatacgacgcgctctaccagtccgcccgctgccgcgcccaggcggattacctggtgggcatgaactttacccgcgcctacaccgtgcgctaccgctcgcttttatcggtagggcgggtgcagacccccacgctggccattctggtcaagcggcaaagagagatcgacgcattcgtcagccaggattactgggaggtagaggcggactttggggactataagggcacctaccagaccgcgcagggagaaagccgtctgtttgaagaggggctggcccaaaaggtgcgggatgcggtggccggcaaggcggccgttatcctgcgggcggattataaagagggcagccgcgccgcccccttgctttacgatttgaccgacttgcagcgggactgcaaccggcgctttggcttttccgctgcgcgcacgctgcgggccgcccaggcactttatgagcggtataagatgatcacctatccccgcaccgacagccggtacctgaaccgggccatgatccccaaactgcccggcaccctggcccggctgacctttggcgcatacgagccctttgcccgccaggcgctggcgctccctaagctgcccattaccggaaggctggtcaacgacaagcgggtgcacgaccatcacgcgatcatccccactgataccacgccccaccccgagcggctggagggggacgcggccaaggtgtacgatttgatcgtgcggcgctttatcatggcctttatgccgccggagcgctatgagaccaccgagattttgacccgggcggcgggagaatacgattttttgaccaagggccgccgcacccttgaacggggctggcgcgccctggaggcgccccgcaagcgcgaaggggagcccgtggagttgccccgggtacaggccggggaggcgcgggaggtgaccgatgcacaggtattgcaaaaggccacccagcctccgcagccccacaccgaggatagcctgctctcggccatggagaatgcgggccgggagcttgcggatgaggagctgcgcgagcagatgaaagacagcggcctgggcaccccggccacccgcgccgccatcatcgagcggctgatcgccgtggagtacgtgacccgcaagggccgcgccctgaaccctacggagaagggcaaaaaactgatcgagatcgccccggcggagctgacctcgcccgaggtcaccggccggtgggaaaaagagctaagccgcatggcccggggcgaggccgcaccgcagggctttatggccggcattgaggactatgtgcgcgccgtggtggaggatatgatcgcccacccggtgaagatgcagttccccaaaaaggaaaagagccccaaggaaaaggaagcggcggaaaagcgcaaggcccccaaagagaccttgggcaagtgtaccctttgcggggagggagagatattggagaactccaaggcctattactgcaccaactggaaggaaaagggctgcaagttcaccatctggaaaaatgcgctgggcggggagggcgtgcgcaccatcaccccgctgatgatgaaaaagctgctgtgcggacaaaaagtcaccctcacccggggcacggtctccctggtttccccagagggcgggctggattttgtgctcaaacccggcatggagccggccccgccgcgcaaagcgccgcctagacggcgctacacccgccgaggggcaaggacaaaaaaataaacgcaacgcatcatgtgccgtggaagaagcattcgcctccggacctggggacgagatttataccctttgtggattaagcattgggcttacggcgcacactatcccgtaagaacggtacggcgatggaggcccaatcgatatgaagttaatacccaataaaatccaaatcatggtggattcaaccgccatgctcagccgtcaagagatggtggacaccggcatcggcgtgatcgagctgccgcttttgatcggcgctacaacgtattatgagcgtccacgcggggaaaatggcgcattgctggcgacgctggccacaccgcaggcccagcaggccaccacctcccaaccggcggtggggcaggtggccgaacgcttccaaacggcgctgcgccagggctatgaggtgatttgcatcctgcttggcgctcaggtgagcggcacctattcgtgctgccagctggctgcgcgcatggtggacggcgggcgcatctcggtggtggattcaggcgtgggcgccagcgccctgcgttttttggccttagaggcgcaaaaaatggtagaggaagggcacgcgcgcgaacagatcgtctccagccttgaggcgcgcaaaggcgcatcggcggtgctgatcgcccccaaatccctggatcacctgcgtcgcagcggacgcatcggcggaattgcagccatgctgggctcggcgttgaacatccgcccggtggtgcgcctgcagggtgcgctgcaaacgctgggcaaggcccggggcgagaaaagggccatggagatgatgctttctgcgctgcccgcaggggcgcgctttatccgcgtgctgcacgtgggcgaccccgagggcgctgcgcgcctgcaggcgttggtgctctcgcgcgtggagggggcgcagtgcgacgttgaagaagccagcccggtctacgctgtgcacttcgggccgggggcgctaggcatcgcctacgcggcagcacaggcgtaaaaagcgttgcttgcgcgctacggacgaatctaaatagcgagtcgggtgtgggtgaaacagtagaataagcgcctaataagatcagtcatatcagataaggaaaacggcgctttgcaaaaaaagcgggcggggaaggattattcctcagtggtcagggtaaacagatcgttgggcgtgcattccagcagcaggcaaagcgtctcgatattttcgtaccggatggatttggtttggccgttgaccattttgttgaaattctggtagctcatacccatctgtttatagagccagtacttggtatgccccttcttctccagcagagagaggatattcagtttcagcatatcgcattctcctagtattggtttaagataatttcgatactagaaagtttgcgccaaaagggcatagactattacattatataatgggtcgatttttcgtcaaaaatcggcttttttgcataaaaaaagcccgaatgccaccataaagtagcatgagggcgcggaaatctctgtcttgtgcagggggctgtttttaaacatcctgcaggttgtcgtcgtcaaacgagtactcgttcagatccttaaaatccaaaaattccgccagggtcatattcaggcctagagcgatgtggtgcagggtggtgatgcgtgggtctttggtaatgccgcgcacaatgttgtcgatggtggattggttgagaccgcacatggtagccagcttattaaaggcgatctgacgctccttgcatagtgcggtgatccgtttgatgatgatttcagagtaggtcaaggcaaatcccccacttaacaaaatttatctaaagggtatcaagaaaaaaacaatagcttacccgtattcgggtaagccctcacagtttcgtctgctataataacctatattcgggtaataccgccgggagaagggtcggtatcaaacccatccagcagcgcggctatcgtggtatccagcgcccgcgccaggagaaccagttcgatatccgtcacaaaccgttgcccgttttcaatgcggcggataaagtgattgtccacgtcatagcccatcacctgcaggcgcagggctagcctgcgctgggaatagggggggttatgcgccagacgcagccgccgcagatttcgcccgatcaaattgttcgtgccatccggcgcctttaacttgaacatggacaggtcctcaataagctaagataggtggtatatactgttaatcattacaagattttaaagtgttataatgaaaatattggttaacggtattcaacacttgcgaaattttgaaggctgcactgcaagtattttcaccaaatttgctatcaaaagggaaaaggcgtgtaaaaaaaggacgcgtgccgcttgaattggggccgcgcctttaagaagtgatggcaagtgttgatgcgcggccggtggatgaggtttaacggatctcctgctccaggttttcaaacaggggcgaatcaaaaaagaagcgcaggctgatgtccagcccgtcgcagatctttttgatggtgacgatgccggggttttggctcttgcggccgagcatgctgtatatggttgatggcggcatacctgctaggtagcctaaggcgtttatcgccagctgtttttcaatgcacagctcgatgatgcgccgcgcgacagcctctttcgtgttcatggtagcaccgctttccttgagtacatacattcatcataaaaagtttagggttgcacgttctgggatatatccaaatgtagggcaagtaatatttggaatatgagatacgctgcaaggcgcatcgccattagcatgtccgcaaaacgtggatgggatgcctggaagattgaggatggcagaggcttggttttcaattgctaataatcttccggggagatataatggaagtgccctgatgagggcagataaattgatggtgcgccgcctagtaggcgggcgcccggttggtgggacgcaaatggaactacggttgctctgcggccgggagggtagcggcaaaagtagaagaatattgcaggagatcgggcaggtagctgcggcggggcggcctgcctattttgtggttccccagcaatttacctttcaggccgaacgggacctgatggaaatcctgggcctgaaggggctgatgggcatagaggtgctcagctttgagcggctggcccacaaggttttcggcgttaccggcgggcaggacgaggtatttttggatgagaccgggcggctgatggtgctgcggaccatcctgacccggagaaaggacgaattaaaggcctttcgcgctgccgcggggcaaagcggttttgcgggccgctgcagcgagatggtgcgggagatgcatcagtacggcatgaccccggaggtgctgcgcgccagggctagcgattgtggggaggcgctgctggcggccaagctggaggactgcgcgctgatcctggaggattttgagggctttcttgcggggaggtatatcgacccggagggaaggcttgcggccctttgcaggcagataccggactgcgaatttttaaaagacgcttatgtgtttatcgacgggctggactcgtttaccccgctgatcgagagcgtggtggaggcattaatgcgggtatgcgccagggtgacggccacgctggcggtggaccatgaacgcccctgccgggacgaggggctttttgccgtagaccggtattacgaaagccgcctgcgggaggcggccatgcgcgtagggtgcaaggtggtcacggtggaggtacggccggaggccgaggcgctgcgtgcgcgcaaggcgccggaactgatccacttagaaaaggagctttacgctttcccgcgccgcgggtacgcgggagcggataccggcgctgtgcgcctgttttcgggcacgggcccgcaggcggaggcggaagatgccgcccgggagatcctgcgcctggcgcgggatgaggggatgcgctaccgggagatggcggtggtgtgctgcgacctggaggcatacgcgcccttgctcaaaacggcgcttgagcgggtggacgtgccctgctttatcgaccgcaagcgccccgcccgggatgatgccgcggccgagacggtgttgcaggcgctgcgcgcggcggatgggcgctaccgcactttggagctgatgcgcctggccaaggggggctatgcagggctaacgggcgagcaggccgaggtgctggagaattacgccctttttgccgggttgcagggcagcggctggttaaagcctttgcactatggggaagagcgctttgacttaagcgcgctggaggcctggcgccagaagctggtcgaaccgctggaggccctgcaccagggcctgcgggcggcccaaaatgtagagcaacagtgccgcgcgctgttccagtacctcgagcagatcgggctacggcaggcgctggaagaggaggcggccgatgcggggcaggacgcggcctttgccgccgcccacgcccaggtgtgggcgctgatcctggacgtgctggatcaggcggtgaccctgatgggcccagagcgccagagcccgcgggagctgcttaaaatgctggagagcgccatggatggcgcggatatcggcgtgatccccaccgcgcaggatcaggtgctggtgggcagcctgacgcgcagccgcagcccggagctgaaggccttgtttctactggggctaaacgatgaaggcgggcaggaccggctgcgggaggaggggttgctgcaccggggagaggccgaccttttggccgcccagggtacggtggtggcgcgcaccagcgccctgcgttttggccagcagcgctttgcgctataccaggtaacggcccggccactgcgccatttaagctgcagctacgccatgagcgacagcgccggccgcccccgccgcccggcgtttttgatcgccgggctgcaagaagccctgcccagactcaagatccagagcgacattcatccactctcgccggcacagttgctttcggccccgggggaggcgctttaccagctgctgccaaagctgggcgaagaagcccggggcgccgggatgggagctgaataccgcgcggcagaggaatacctgcaaagccaggaggcgtggcgcggccgcctgatgcgcgcgcaggcgctggccgggcggcgggcctttccccagatgctgagcggtaaagccctgggggtaatggggcgcgcgccctataggatgagcgtaacccgcttggagcaatttgcccagtgcccctttaagcacctggtgcgctttggcctgggcgcccggccccgggaggaggcgcgggtagacgcgcctggtacgggcttgctgctgcacgaggggatcgagcagctcagccgtgcggcgctgatgggccagtgggattttgtgaatttggaaacagaggaattggaggcgcgcagcgatgccctggccgatagcatcctgccccggtactttgccggcaagttgggggaaagcggccggggccggtacctaagcgaccggttcaaaaagacgctgcgccgcagcgccggccttctggcccggcagatgcgggagagcggatttgagcttcaacatgtggagctggattttggcggggagagccagctgcctgccctgaaagtgccgctgcccggcgggggcgaggtgtggctctttggccggatcgaccggatcgacgtgctgcatgggccgcagggggacagcctgcgggtgatcgattacaagagcgggcaggccgcctttagcttgcgggatgtgtactttggcctgcgcatccagctgcccgcctacttaaacgcggcgctgagcggactgccgggggcgcacaagcgcccggcggggatgttttactttgccctgcgggatccgcagctcagcttggaggcagacgacagcctggagcgccagacgctggccgcaggacggctgcaggggctggcgctaaacgacccggagctgctgcgcgcggcggatcatgccctggaggggatgggcgaatccgccatttatccggtgcggttgaaaaaagacggggatgccagcggcagcgcactggtcacggccgagcagttcgaggctgtgctcaggcgcgccctgcgcatggcgggtacctgggctaaaggcatcctggagggggattgccgggcctatccggtgcgcagcggggcctatacggcctgcatgcattgcgattacggagccatctgcgggtttgatccaagggatgcccgctgccgtacccgtaccctgcccgacggtacccaggccgaggctctggcggccatggagcgggaatggaaggagggaaaatgatgccaaactggacgccgcagcagcatactgcgatctacgaccggggaaaaagcctgctggtctccgccgctgcgggcagcggaaagaccgccgtgctggtagagcgcatcatttccctgattcgcgagggagaggacttagagcacatgctagtggtgacctttaccaacgccgccgccagtgagatgcgcgagcgcgtccgggatgggctggagcgcgccctgcgcgaggagggggaaaatgcgcacctgctcgcccagctggaggccattggccgggcggatatctcgaccatccaccgcttttgcggcgagctgttgcggcgttatttccacctggtgggtattgacccgggctttcgcattttagagcagccggaggcggacctgatggcgggcgaggccgtagaggccgcctttgaggaagagtatgagcaggccaccacccggttttataacctgctggattccttttccgccaccggagacgacgcgccggcacgggaggcggtgctgcggctataccggtttgcccgcagcgacccggacccgcagggatacctgcagcgggcgctggagaactacagcctcaaggaggcggattttgccgcgtcaccctttggcagcgagctgaaaagtgcggcggtggagatgctgcgcggcgcttgcagcgcgctttggccctgtgtggagatgagcaaagcccccggtgcgcccgagaagtacgcggcctattttgagacgcattataccttgtttgtccaggcggcagagcagttggagcagctggatatggcgcagggcgcggcgcttttggctggccttggttttggccggctgcccgcccggcgcaagggggacgacgaggcgctgtgcgaggccattaaaaaacggcggggcgcggcgcaaaagttgctggcccaggcgcaaaaacagctgaccccgcccgagggcggctataccgctgggcttgagcgggctggggagctggcttacgagctggtctacctgacccaaagctttgccgcgcgctatgcgcaggccaagcaggagcggggcgtgctggacttttccgatctggagcacgaggcgctgcgctgcctgcgcgcgggcgcggcgcaggaatgtgcccggcagtacgcctatatctttgtggatgagtatcaggactccaacctgttgcaggaaacgctattgtccacctttgccagggaagataactgcttttacgtaggggatgtcaaacagagcatttatcgcttccgtttggcggaaccggggctgtttttggaaaaataccagcggtatgccgatggcggcgcccagcagatgcgtatcgacctcaaccgaaacttccgctcccgtcccgaggtgctggaagccgttaacacggtgtttgagcggatcatgcaggaggggccgggggggcttaattatggcgcggccgagcggttataccccggccgggaggcggtgcagccctcgataagggcggagctgcatttgctctccccgcgcaaggagatggagggcgagcccgaggccttggccgaggcgcgccaggtgcagttggaggctcgggcggtggccgcccgcgtggcggcgctgttgggcgaggaaatacccgatggctcgggcggaacgcgcaggatctgcccgggcgatatcgccattttgctgcgcacggtgcacaaccaggaaaaggagtttttggatgcgctctccgaggcaggcgttcccgcctggtcagaagggggtgcgggcttatttgaggcgccggaggtatccgcctttttggcgctgctcaaatgtatcgacaaccgccgccaggatgtgccgctgctaagcgccctgcgcgggccggccggcggctttgagctggaggcgctgtgcgcgctgcggctgcgctatccgggtacccgctacttttttgaggcctgcctggaggctgcaaatgatgccgaaagcggggaagaagggcagaaaatgcgggagttttttgcccggctggatgcctggcgggcccggctgcataccatgggtttaggcgactttatggattatctgatcgaggattccggctttatggcgggcacgctcacgttgcaggacggggcgcgcaggctgcaaaacctacgccagatcgccgggcaggcccgcagctatggcgcgcatatgggcaaccacctggatggatttctcgccacctgtgagaacctgcgcacgggcggggagagtatgggcgccgtgctgctgccccagggtgagcaggtggtgcgggtaatgagcatccacaaatccaaaggcctggagtttcccgtggccattgtggcagggctggggcggcggatgaaccgcagggataccaccgcgccgctgttgatggaccgggctttgggctttggactgcgggattacgatgcgcaaaagcggctgttcggcccgacggtgatccgcagagccatcgccagccgtaccgggcgcgaggcggtgcgcgaggaaatgcgcgtgctgtacgtagccatgacgcgcgcgcgggaaaggctgcttctctttggctctaccggagggatggaggagacgctttcgcgttggcgcaacgcaggggattatgcggcccaggcccgccaggccaaaagcctgctggatatggttggcccggtagccctttctctggagggagaggccgcctttgcggtgacctgccaccgggaaatggagggctttgagccccccgccgtggcccaaagcccactttatgaagaaacggaggcggatgcggccgcaaagcaggtgctgcgccagctgtcctggcgctatccatacgcacaggcaacggctacgcccagtaagctgacggtcagccaggtacgctttaaggaaggcgcgggcgaggtacgctttgcgccccagccccgctttatggaagaggagcggcagatcaccccgttgcaacggggtacgctaactcaccgcatgtgccagttgatggacttaaagcgcgcccacagcttaaaggacctggaagcgcagctgcaggactttgtggcgcgcaggttcttttctaaagaggaagccaaggcgatctccctgccgtggatttggcggtttttgcaaagcgatatcggccgccgcatggctgcggcccaggttttgcaccgggagatcccatttagcttatcgatcccggcgcgggaattgtttgaagaaaccgaacatggagagggggtcgtggtacaggggatcatcgacgcgtgttttatggaaaatggaagttggattttgctcgactataagaccgattacctgccgtttggcgaaatggcagcctttaagcggcgctatggcccgcagctggacgtatatgcccgggcgcttggcacgctgacgggcaagcccgtatccaaggggtacctttacctgttgcgcagtggggactgcattgaaatgcctttgggcacgtttttagggtagggccaaaaatgtggctggctttttgaggcattgcgggatgaggggggacaaaacgggctatgctatccagggatgtatacgttcttttcctgagcgaaacgctatgctataatggtaaagcccaggggaaaacctacaaaattaggggaaaatgaaagatatatagcaggaaaactgcaaaatggttttggtggcttagggatagttgtaactaggagggatttcattcatggcaaatggaaaggatcatttgaaagacgagggcgcggggaaagagcaggtcaagccgctcgtcaacaagcagatattttatgacctatgggagcaggatatgccagagctggccgcagagcgggaaaaacttgaaaagatgacagaggaacggctgggtgaggacgaagccggatatctctctttacaggtggatgaggacttgctggcgcagagccgcaaagtggatgagctgatcgtcgaacagatgaagcgcatgggtatgctggacgaaaacggaaagctggccgaaagccagaagcccaaaaaggaataaaaggctttgacgatcgttttatcaggctatgcattttgatgggtaaaaaatgcagtacttaaggggattggcgcgcatatgcgccaaagtccaagcataggagtatcatcttcaatttcctatccactttcaaaccttgattataataaaccgcttctgatgcagaggcggttttgttttatctgctgcgcgtgtatgggatgggtgaaggagcatgtgtttattatagcatagcgtttcgcgccagggtgcgcactttacaccgggacataagctgaggcaaagccctaaacagagcagccctgtttggggcgccttcctgctcgcaccccttaaggggtgcgtccatctcccgcggaggaatccccccgagggggttgggttcggttgggtacggttcggttaggttcggtaggtgcgtcacaccgcgtcacagctgcgtcacagttcgcgtcacggtgacgcgtcaccaaagcgtcacagccgcgtcacggtaaggcgctgccaaagcgcggcgcgggcagcggccttgcaggcgttaagcagaaaatataaaatgccctttaaagccggacggtttttacaggaacgcctgattttatggggcgttggccgaaaaggcgcgcttattttgcgggcgggcagagcaaagaggcgctgcagggcaaagaaaaaacgggtgtggcatttgccacacccgttttgtacgcttttaagcggtaaagcgcttatttctgggggccagcggaaaccagcgccttgccggcctcgttgccctcgtacttggcaaagttcttgatgaaccggccagccagatccttggccttttcttcccactcggaaacgttggcgtacgtatcgcggggatccagaatcttgggatccacgcccggaagctccgtgggcacttcaaagttgaagtaggggatcttcttggtgggcgctttgaggatgtcgccgctcaggatcgcatcgataatgccgcgggtatcgcggatggagatgcgcttgccggtgccgttccaaccggtgttgaccaggtaggccttggcgccgctcttcttcatgcgcttgaccagctcctcggcgtacttggtgggatgcagctccaggaaggcctggccaaagcaagccgagaaagtgggcgtaggctcggtaatgccgcgctcagtaccggccagcttggcggtaaagccggagaggaagtagtactgggtctgctcgggatccaggatggaaaccgggggcagcacgccgaaagcgtccgccgagaggaagataacctctttggccgcgggcgcagcggagaccgggcgcacgatgttatcgatatgatcgatcggataagaaacgcgggtattctccgttacggacttatcgtcaaagtcgatcttgccgttctcatccagcgttacgttttccagcagcgcgttgcgcttgatggccttgtaaatgtcgggctcggactctttatccaggttgatgaccttggcatagcagccaccctcaaagttaaagatgccgttatcgtcccaaccgtgctcgtcatcaccgatcaaaagacgcttaggatcggtggacagcgtggtcttgccggtgccggacaggccgaagaagatggccgtgttctcgccgttcatatccgtattggcagagcagtgcatggaagccacgcccttgagcggcaggtagtagttcatcatggagaacatgccctttttcatctcgccgccgtaccaggtgttgatgatgacctgctcgcggctggtgatgttgaagaccacggcggtctccgagttcaggcccagctctttataattctcaaccttggccttggaggcgttgtaaacgacgaaatccggctcaaagttcttgagctcttcctcggtgggctggatgaacatgttctttacaaagtgggcctgccaagccacttccatgatgaagcggatagccatgcgcgtatcggcattggtgccgcagaaggcatccacaacgtacagctttttgttggagagctcctcctgggcgatcttctttaccacatcccaggtctctttggaagcggggtggttgtcgttcttatactcatcagaagtccaccacacggtgtccttggagttctcatccattacgatgaacttatccttgggagaacggccggtgtagatgccggtcataacatttacggcgcccagctcgctgacctggcccttttcatagccctccaggttgggatcggtttccgccttaaacagatcgtcataagaaggattgtgtacgatctccgtcgttccggtgatgccatacttggtcaaattgatgtctgccatattctgctctctacctcttttctttgtatttttaatgcattgcaaactgcctttggtgccggtctttaggggaattaaaaatgccccaaccttcaccacttaccattatacagaaaccagggaaaattacaatacagatttggcaattttgcaataaaaaggcccttttcattcacaatggatgaaaagggccttttctttaaatgctcattccaaagggtaaaagcttattcggcgtcgaccttggccatgtgctggatcaggttgacgaccttgttgctgtagccccactcattgtcataccaggcaacgagctttacaaaggtgggcgagagcatgatgccggcggtcgcatcgaagatggacgtgcgcggatcggtggtgaagtcgctggaaaccacagcatcctcggtgtagccaatgatgcccttgaagcgatcagactcgctggcttccttcatcgcggctttgatctcgtcataggtggtctctttggccaggcggcaggtcaggtccacaacggacacgtcagccgtgggcacgcggaaggccataccggtcagcttgccgttgagctcggggataacaacacccacagccttggccgcgccagtggaggaggggatgatgttgaacgccgcgccgcggccgccgcgccaatctttcttggaggggccgtcaacggtcttctgggtagcggtggtagcatgaacggtggtcatcagaccctcgacgatgccgaacttatcgttgatgacgctggccagaggagccaggcagttggtggtgcagctggcgttggaaacaaccttcatatccttggtgtaggtattctggtttacgcccataacgaacatggggctcttatccttcgcgggggcggtgatgacgaccttcttggcgccgcccacaaagtgcttggaagccttctcttcggtgcagaacacgccggtagcctcggcgatgtactcagcgccgcagtctttccacggaatctcctcggggttcatgcaggcgtacacggctacttcgttgccgttgaccaccagcttgtcgcccttcacgcacacttcaccgtcaaaacggccgtgtacggtatcgtacgtgagcatgtatttcatgtactcaacgtcgatgaaaggatcgttgatgccgacgacctgcacttcaggattggcggcagccgcgcggaaaaccaagcggccgatacgaccaaaaccattgataccaatttttaccatgatttttcctccttagccaatttatgcttctattattttactccacctgcccccaaatgacaagccaatttgtgaattctttaacacttcttgatgcaattataacgcaaccgccccgcacatctgcaaaaatgcggaagattttggcaaacgatgacgtgtaaacggttttgctgcgcaattagcagccataaagatgggaaacgtgttaaaatataacttgtaaagaacgaatggaaagggggcggactgtggctgggttgttttggatcgcgctggcgctggcggccctgctggttttggcgcggctgatctatgatttcagcgcgctgaaggtgacgcacgtcgctttagaacaccccaagatcgccgcgcctgtacgcatctgccacttgagcgacctgcacacgcgctcttttgggcggggcaaccggcggctgcaacaaaaggtcgccgcccttgcgcctgacctgatctgtatgaccggggacatggccgaccgacgccggaaaaacgcgcgctttgtgcgcgaaaccgcccgggcactggccgctatcgctccgctttactctgtatccggcaaccacgatacctatgtaaataagcgcaaaaaccggctgtttggcgccgtgcaagtgcgcgcgggcggtggggaggcgccgggaaggaccgagcgagtggtacacatcggcaggacgcctatcggcatcagcgcgctttcggatgacgacgatgaggatgcggcgctgatcgcgcgggcgcgcaaactgcgctttaagggcgaggccttccacctgtttttatgccataagcccgaaatatacccagatatcgcggacatcggctttgatttgatgctggcgggccacgcgcacggcgggcagatccgcctgccggggctgcccgcgctttttgcccccgggcaggggctgctaccccaatatgtgggcggcttgtaccgggaggggggaagtgcgatggcgctcagccgggggcttggggcctccagccggctgccgtttcgcttttggaacccgcccgagatcctgtgcattacgctgcagccatccaaaaaggaggataagggatgctgaaaagctgggtgcgccaggcgctttccctggggctggggctggcctacatcgcactggggctggcggccctggtcaagctgggggagagctggcgctggacggtgtacgttattggcctggtgctgatcgggctggcaatataccacctgatctacggggcgcaaaaaagcgaaaagggctataaaaaccctgccctttgggcgcaggctgccctgacgctggcgctgggcgtgaccttgcagctgcatcccggggattttgagatggtggtgcaggtcgtgctggggctgtggatcgcaggccaggggatgatcgatgcgctggtcggcctgcagctctggctggacggtgagccgggaggttggacccggctggcattggcgctgctctcatgggtttttgccggcgcgctgtttgccgtaggtcaggtggcggagctgttttactcgctggtgttaggggtgtacctgctgctgtttgggctgcgcaacatctaccgggtattggagcagcggggggtattgcgcaaacccctgccccagagcgtcaagcggcggctgagcatctcgttacctatcttcatagaggctttctacccctcgcatctgctgcggaagatccgccgggcgatccggaaacagggagccgaaagctttaccaaggcctatgagatcggcggggaaagcgcggatatcgaggtgtacatccacctggccgagccctttatgagttcatttggccacctggatatcgccataggggatacggtgatctcctatggcaattacgacccgggcgggcacctgctctggggcttattcagccggggcgtggtagccgtggcgccccgggaggattatatttattattgcattgaaaaagagaataaggtgctgctgggctacaccatttccgccacggcgcagcagttcgccgccgtgagggaaaagctggatgagctgtacggcaactggcagcgctggaagccggtacggggggataagcggctggactatctatttaagatgcaaaagtataccaatgcccggttttaccgggtggtcaaatcccccttcaagcggttttccaccctttcgaccaactgcgtgcggatggtggaccagttgctgggcgccatgggctttcggcgcatcgcaccgggggataccattacccccggcgcgtgctaccgcttttttgaaggcgagctggcccgggaggagagcccggtgggcggacggcgcatctacgttaaaaacggcggtaaagatctggaaaagcgcaaaaaagatcagttgcgccgggagaaaaaggaaaaaaagcgcaggcgccgccagaaaaaggaggcccgcaccaaaaggcgcgcggccaaaaaggccggcataaaaggctaaaaggaggaatggagatgtcggacaggatccagatacgcatggccacgccggcggatgcggcggcgctgcgggcaatctatgcgccctatgtgcgccgcacggccataacctttgagtacgccctgcccacagagcaggaatttggcgggcgcatccaaaatacgctaacgcgctacccatacctggtggcccagcgggatggcgtccccctgggctatgcctacgcgggccgctttaacggccgccaagcctatgattgggcggtggaaacttccatctacctggcgatggaagcccggggcaagggactgggacggacgctgtacgccgcccttgaagagattttaggtgcgcagcgcgtgctcaactgcaacgcctgcatcgccacctgccagggggaggaccggcacctgcccgtgggaagcgtgccttttcaccagcgcatgggctaccatctggtggggcgctttgcaaagtgcggatataagtttggcacctggtatgatatgatctggatggaaaagcatttggccgcccacccggcgctgccgcagcgcttcattcccctggaggagatggaagcgcagtggcggggttacgaaaggacgattgacctggaacagggatagcagatagcaaaagcccccggcaaatggccgggggctttgtccttttagtagaacttttttgagcctgtagacgcaaaagcgggcaatccgctgctatcaggccagcgagacggcgtaaaagccgctgcgggtggtcatgtacagcgtctttccatccgcgccgccaaaggctacgcagctgggccggtccggacaatccacccacccgatgggcgttccgtccgcctcgtacacgtaaagctggccgttgggcacaaacaggcggccgcgtgcatcctgcgccacgctgtactcgccccgctcggccaccacctggggatgggacagggcgccctttgcatccacgtcaaagcgcacggtgcgctttaagtactcatccaccgcgtagaagggcgcgcccggcgtggcgggggagagggtggacatgcggatcagatcgtagcagtaggggacgatggtcaccccatccggcgcgacaaagcatttttcgcagggttccacggtcttttgcaggtaatcattggaatcccgccagcggttgccgggatagtaagcccgggcgaccttatctacgccctgcatatcctgcaagggcagggggcgcacgctctcctcggggctctccgggtcgatggcgtacatgcgcaccaccgcgtccgcccggtaccaggtgccgtacgaggtgggctcgttgggcttatcccccaccacgggccggccgccctgggtcgcccccttggggatgatgaactcgcaggccacaagcaggttgccaagggtatccaccgccagggccaggggcttaaagggcgcatcccagatcagctttagcgtttggttcgccgcgtcccaacggtagatgcggcgcatgcgggattcgctaaagtacacgttgcctttttggtccgccgtaatggcgtcggggaactcgaagccgccggccaatttctgcggcgcgccgtttaacaccgccgggcaggtgacgggcggcagcttttcggccttttcgccgaggataaggctgctaagctgccaggggcgtacctcaaggccgctggtgcggtcatacagcaggttatccatggtgtacttgacctgggtaaagttatgcacattggcaaactcgatatcccggcacccctccgtagtgatggcgtaaggatagggattatacagccagatcacccggaacaggtaggtgttggcaaagagcatgtccgcacaatcccgcagctccagcggctggcagtggcggctctcggccacttcctcctcggtctgcaagccgtacaccttccagttgcgcacgtttttgaacttgacctcgttgcggcaatggtgctcgatgctcatggcatagatgcgggaggggatatgggtatccgaggcgtaaaagcccgccgccgcaaaggtagaggccgtccaaatatccttgaacacgccgccacctccggctacccaaagcgaccagtactggtaatcccacacccggtcgatattcggatccgccgtgcggttggcgttatagctgggctggttctgcccatcccagcccatggtaccgtggccgcccacgaatttgacgtcgttcatatagctgcccttacccgcgctccacttgcaccctacgatgcggggattattggccccggcgtttaggccgatgccaaagaggatgttctgcccgcccggggccacctccagcagcggcagcggcgcgcccacatcgccaaaggcctcgcagttatccggcgccaccagttgggtagagatgggatttagaccgatcagcttcgtgcccgggcgcatcttcagcggacgggtgacgatgtaccagccttggggcagatacaggcagtcgtacttttgcagcgcggcttccaaaacgtcggtatcgtcggtgcagttatcgcctttagcgcccagctctttgaggttgacccacgccgagaccggcggcagagccggaatgtcgctctccggcatgaccggcggcgcagatagggcggaaagctcgcagatggtgcgcatctcctcgtgcgcgcctaagccttcctgcaccaggccgtgggtaaagcgcgttacgtgataatcgcccgcctgcccagcgcagaccttgccgctctcccggaagcgggccagggtaggcacgttatggcaggcgacgttgcgcaggttgatctggcccacgctgttatcctctaagctgatgacaagggcggtatccgagatgttctccagcacactgtcctccacgtacagcttttcgtaaaagtcatccggcgtttcggcaaacactggggtatccttgacgtaggtgcggatggcggtcaaacccacctcctgggtgcgcagcgcggccttgcgctggccgtaaaaggcggtatccaccatcacaaagggccagctgggggaggtgcgggtggagatgatgccgtaatccccgccgaaaaagcgcacgtcctccatctcgttgcccgcgtcaaatatcccggcccgaccgctttcgacgtggatatccacatgggcgatgaagctgtgctgggcaaagtgggtgcgcagcgctactgcgctggggttgccctgccctaagcgcaggtctacattgaccagggcgctgtaaaaggtgccggcgttggcgtcccgtacctcttcgcccagcttgggcacccggtctacataccaaagcaggtatttgctgtgccctttatcctccgggtcgtcttgatcaaagccgggggcgttgtcctccagcaccagggtaggacggttttgcccatagccgatcagtcgcacggctttgggtacgtaaagggtacgggtaatgcggtaggtcccctctggaataaagacgatgccgtagcccatctcatcttttacctggttgatagcggcctgtatccccagcgtatcgtcgtttacgccatctccgcgcacggggaagttctccggcgtgaggtaggcggcacgaggatcttttggcgcctgcaaataaaacgattttgaactttgcatagcaagccctcctttttatctttggcttttcactttaggcgccagacgcggcgcccaatttatttaaattatagcatagttaacgtaagaatttaaggaaggcttgcaaacaaaaaagcgcgggagatcgtcccgcgctttttgcttggtttggctattcccttccctgggggcggtaggtttcgcaggccgcctcttgggtgggctgctgggagggcatgccgatcttcagctgccctgccgtacattgcaggtctgcattgtacaggcactccctggccgtgcacagcaccgccgggttatggtcctccatccgcacggatgcgccggtgatgggggaggcaatgcctacgcccgcaaaatccacctcgataaaaccaaaggtggacatgccctcggtgggcttgttgggcgtatcctcctcgcccagacggtaactgtaggtggagcagcgcacgacgggggcgtggtcgtccaccacttcaatatccccagcgccgcaccggtagttgttgttatacgcgcaactggtggccaggcaacgtaaactcggtctcattcttgcgcctcctttaggctagcgctgctggaagctggcgcacatgctctggtcttctttgcgcccggtcccatcgtcgcggcagttgcaaacgtcgatggcgtccagcccgcagcggcaactgtcctcgttgaacgcgcacttggtcacatcgcagtggatggcctgacggcccatgcaatcactcatgcttaacatacctcctttgttttgggttaaccctagctttccccggcgtgggcgaaaacaagctggcaattcctagcttaaaattttgcctagaaggtggatttgcccgccaacggctcaggaggtataataaaaacaaccgattctaaggcggccgcatcgggcggcgcttagacataaaagcgatttggaggaacgggcatgcccaaccataaaaaccgaaaaaagaaaaaaagtaagggcaagggcgcgccgcttgccgcgcagggcccaagcgcgtccacgccatcttttagctgccggtggctgccctactatatttatggctgcctgccggtatacgcgctggctactgtggcgtattttgcgtttttaacgctgcccgctttggtgttgcccgcctgggagatggggatgcagggcatggcgctgctgattacggcggcctcgctgagcccggcggcgctggcggcgtatctggtcgttccgctggcccggcggcgggcggcgggcttccggggcaaccgcatttttttggcggtagcccccttgctgccgctttatatgccctggcagatgcttttgctgctggcggccttcgcgctgcccaacctaatctattttgaacggcgcaaatccctgtttgccgggccggagatgcaccagaagctgtgcggccggctggtggccatccccatgctggttggccttacgctgtgcctggtgcagtttgggctggggcctgtgggggtgtactggatctacgcggcgaacatcgcggcgctggtgcttgcgctgtgggtgcgccgccgcccgccgcttttgagcgaccgggacgtgtattttgacggagaacattgattaaaaatgaaatcttaaaattgggggctgtaccatgcaggggaatttggaaaaatttgacctgtctgggcgtgtgtgcgcggttttggcgccccggggaaaagggccttatggctgtgcgctactttgcggactggaaccggagcggctgcctaccttggcccagaacctgccggatatggtgctgatggccgtacaggccgaaggcatgcgggattacaccccctgggccgccccgccgctgcaggcggacaggccctttaccgggcaggcgcaggcttttttggattttttgaccggacaggcgctgccgtcgctggcgctgcgggcgccggtggaggagcggccctgccgcaggctgctggcgggttactcgctgggcggcttgtttgcgctgtgggccgcggggcaatgcggggcgttcgggctggcggcttcactctccggctcgttatggtatgatggatggcttgagtacttgcaggataccccgctgcgggccggccgcatctacctttccctggggcgcgcggaggagcatggcggccccgcgcgcatgcgcgccgtgggggaggctacgcgcagcagttacgcgtttttatccgaccagctggggccggggcgcgtcaccctccagtggaaccggggcgggcattttaccggcatcccgatgcgttgggaaagggcgctttgctgggccgcaccctatctggcagggcaaaatcctggggatatgcgccctggttccgggccagactaagggttacacatgataatttagaaagggagaagaaaaatgcaggagatactgatgtttattctacccgattgcccctactgccatgaggcaaaaaggctgatcgaccagctctgccgcgaaaacccggagtaccgcaaagtctcgctgcgggtaatagacgagcgggcacaaaaggaattggcggaccggtacgattattattacgtgcccaccttctacgtgggtggacaaaagctgcacgagggcgtgccggatatggaaaaggtgcgccaggtgtttgaggcggcctgccgcccggcgccgtaaggaagatgcgcgccgctgttataacggcgccccgccgcgtataggaaggattgcgtttgcggccggtgcgcgttatcctgataacgcaggtcccaccaaaaccacctgcggcccgctggttctcctagacagcgggccattttattatccgggatcatgctgctgcgctttaaagacgagctgaataaactcgctaaaacactttatggccgcggcctgttcctcggggctaagagtttgaaagccgttgagctgtttaaagagcggcaggtagatatccatgatgtgcagtttgcaattttctgccagcaggctggacaggtccacatccaagccgtccgccaggcgctccagcgtgcttaaagtcgggttgccccggccatgctccaactcgcgcagcaccgagaggctgatctcggtattcaaagaaaggtcctcttgggtaagggcatgcacggcgcgcagggatttgatgtttcgggcaaggcgatgcagatatttcatgagacttgtcctccttaagtataacttatgtgaacatgcctcatgtatcaatttgatataacatcggtattccaccgatgaatcggcggtgacggttgcccgggcagcccttacacctatggattgggcatagcctgaaacggtagaaatacaaacggcgcagggggtatcccctgcgccgcgcaactctaccagggttattgtgcgttaaagatgatgtcctccaccgcggatacgatatcctgggtggtgaagcgggccacgcccagagaatccagcagcgtgtccgtatcggtccgggtcaggtccagatagcggaactcggctttggagatcgccgtctttaaaatacggctctcctctggcgtgttgttggggtcgttagcctccatctccagcagccgcagcgtaacggtaacggcctgttgcttattaaacagggcgttgctggcctcgccggcaaattcgcgaacctttgaaagcgtcctcatttccaaccattcctccttcgctaagctttaccttattgtacacccccataccttgaaaagcaaaccggccgggcgcctgcagaaatggggcaaaaagggcgggttgcttgcgcttcccgcccttaaggtatgccattatgctttttttcatgcggcgtacgcgcaaaagcttattttaccgcgtcctgcatggcctgggcgccttcctgcatcgtttggctgccatccagcagcaggtcattggcctgggtcacatagtccaccagcttgttcacatccttggaggacatgtaatcgttgatgccatcgcggtattggtccagcgcggcgatgaatttttctgcggcctcgctgtagagctgctgggtctcctggaagatggaaggcgcctgcatgtttttaaagttttcgcagtcctttttacaggtctcgatcttatccaaaatatcctgcgcccaggcttcgtccgcatcggccaggttctggaaggcctttccaacatccgtcatggagctggaaagggcgttggccttggccgtcatatcgttgatatagctcaacaggctgctctcatcgtctccagcggcagatgaagcggacgcttggggcgtggcggtggccgatggggtggcggtggcttccggcgtggcgctgggggatggggtggcctcgggagccggcgcggcgcagccgcccagcatcagcgttgcggctaaaagggcgcacataagtgcgcagatcagcgttttggttttcatgttttttccctctctctttctcaaatctgcccattctctcaatgaggcatatttgcataatacatattaagaatagatattgtaaacgttcctgtcaaccccgctggagcgctggattgtggtggcaacgggaaaaagtgtgatatactgacaagatagagtggttttcgcatttttaaggaggcaagcatgaagagaaacagcggccccatgcttttgcgggacctgcgccgggagatcgcccgcacggcggggcgctttatctccatcaccgtgatcgtggcgctgggtgtagccttttttgtaggcctgcgggccacggggccggatatgcgccagagcgccgatggatattttgaccgccagcagatgatggacctggagctgctctccaccctgggcttcacccaggaggacgtgcaggctttacaggcccagacgggcgttgagcaggtgcagcccggctatcagttagatgcgctggtggtgcaggatacggcggaaacggtggtcaaactttattccatcccgccgcagagggagcagatgctcagccggcctagcctggtggagggcgcctggcctcaggacgaggacgagtgcctgatcgatacccgcctgtgccagcgtgccggccttgcggtgggggatacccttaccctggatgaggggcgtggcgcgcaggaagaccagcaggatatgccgcaccttggcaggcagaccttccgcatcgcagggacggtggaaagcccgctgtttatcgatctggagcggggcaccagtaccctgggcaacgggcaggcggatgcttttatttacctgccccagtccgcgtttgagagcgaggtctatacccaggtacagctcaccgtatccgacgcatccggccttaacagctttttgcagccctattgggttgtggtagacccggtggcgcagcagctggaaacgctgggggagagccgcgcggcgcagcggttaagcgatgtgcgcggccaggcgcaagagaagctctccgatgcccgggaagcgttggagagcgccaggcaagagcgggatgccgcccttgaggcggcccaggcggagctggatgagggggcgcaggccattgagcagggggaggcggagtacgcccgcagccaggcggagctgaccggaaagctggaggccggagcgcaggccatagaacaagcccaggcgcagatcgacgcgggccagttggagttggaagtccagcaacaggcgttggagcagcgggccgcacttttggatgagcagcaggcggcgcttgacgaaaatgaggcggaataccaggcgcgaaaggcgcagctggagcagggccaggcggactttgaggcccaacggccccagatagaggcgctggaaaagcaggtggcggattttgatgcgctggctgcgcagatcgcggcctaccccacgccgggggatgagacctatgcccttttggtggcccgctatgaggcgctaaagcctgcggtagaggcgctgcgccccaaactggaggcggcgcagaagacccagcaggccctggaagcatgggatgcgcagcttgcccaggcggcgatagagcttgagcaggggagggctgcgctatccgccggccacacggcgctctccgatgcgcgcggagagctggatgccgctaaaacccagctgcaacaggggctttgggagttggaaaaccagcgcgctgcgctggaaaccggccgccgggagggggatcaggcgctctctttggcgcgcgccgggctggacgaggcacaggcggcgtacgatgcggggctggcagagcttgaaacgcaaaaggccgaaacccaagggcagctggatgaggcgcaggcacagatcgatacagcgcagcagcagttggacggggtgaccagctgccgctggtacgtgctggaccgcagggataacgccggattttccggctacgacgaggatgcggcccgggtaacggcggtagcggatgtattcccggtgttgttttttctggtggcggctctggttagcttgaccaccatgacccgtatggtagaagagcagcgcacccatatcggggtactcaaggccatgggctacgggccatgggcggtggcctttaaatatgtggcgtacgcgctgcttagcacgcttttgggttgcgcgctggggatgatggcgggcttttggggcctgccgcgggtgatttcttcggtatatgccatcctctacacggtgccgccggtgcaaacgccctttatcccatcctatgccattggggctacgctgctggccgtggcctgcacggcgctatcggccttcgcggcttgtgctgcgacgctgcgggaggccccctcccaactgctgcgtccccgcgcgcccaaggcagggcgccgggtaatactggagcggatcggctggttttggaggcggctctcttttatccgcaaggtgaccgcgcgcaaccttttgcgttaccagcgccggttctggatgactgtgctgggcatcgccgggtgtatggcgctgctgctgaccggctttggcctgcgggattccatcatgtccatcgtgcccaggcagtttgaggggatcagccactaccagctgatggtatcggttgacccggatgccgccgcgggcgaccttaaagcggtagccgctgcgctcaaaggcccggacggcgcggccagcacccttatggtctccatgcagaacatgcaggccacgggcccggagggcggaggcagcaacgatgccatcgtcgtcgctttagaagaaggagagactctgggggattacatctcgctgcacccccgcgcctccgaggaggagaccgtggtgaccggcggcgaggcggtgattaccgaaaaactggccagcctgctgggtatcggcgtgggagatgccctcaccctgaaggcgccgggcaatggggaagagccggtgagcgtggtggtgggcgcgatcgttgaaaactacgtttaccattacgtgtacctgacccaggaggggtacgccgcggccttcgggaaagcggcgcagcccaatacctacctttgccgcctggaaggggaggatgcggcccgggacgatgcgctggcccagaaactgaccgccaacgcggccgtgcgccaggtgcgctttaccaccaagggcctggaggatatcaaccagatgctgagcagcatcaactatgtggtttacgtcatcatcattgccgcaggggcgctggcctttgtggtgctttataacctggccaatatcaatatcacagagcgcacgcgagagctggccaccatcaaggttctgggcttttacgatggcgaagtgacagcctatgtctgccgggaaaacgccctgctgacagtgctgggcatccttttggggctggtgggtggctactttttgcaccagtatgtggtggtgacctgtgaagtagatatggtgatgtttggccgggagatcgccccgatgagttacctttacgccgcggggatgacggcgctgttcgccgcgctggtcaacctggtactgcaccgcaaactgcaaaagatcgatatgatcgaggcactgaaaagcgtggaataatgacgaagtataagcatagggccccgggcggatatttgatccgcccggggctttctttgtaaagaaaaccacgcgttagacgcgtggttcaaaagagcctatggcgatgaagaagaaaactccctttgctaaaataaagtgtagtctgccaactgcacaaagaaagcaaagggagttttcatatgggtataaatgatattaatagtctatcgcatagccgatggaattgcaaataccacatagtatttgcgccaaagtacaggagaaaagtgttttaccaagagaaacgggaagcagtggggaagatattaagacaactatgcgaatggaaaggagtaaatataatacaagcagaagtatgcccagatcatgtgcatatgctggtggagataccgccaaagatagcagtatcaagcttcatgggatacctgaaaggaaagagtagcacaatgatgtatgagcaattcggggaactgaaatataagtataggaatagagagttctggtgcaaagggtattatgtagacacagcagggaagaatgcgggaaggatagcagaatacatcaagaatcaattaaaagaggatgaattgggagagcagttaacaatgcctgaaggcagcccttttaagggcggcaggtagcagaatacgcagttggcagacatatttatgcgtttacgcatcccgcgaagagcagagggcttcgcccgcacatgaaataccacccgcttggcgggtggatgtttatttcatgcttgaatagcagatgactgggtcaaattataggctattaagtctatagtaaaaataagacttaatgccgatttacagcgatacgatataggaattaaccttaagatacttcgagaaattgcgagtattgtgtacaaaaagggcgaatggctaaaaaataaccgcatgggtccgagaaaacgcagagttttacgagcaggcaggcaatactaagtgcaactgaacatcagttgcttttttattagctgtatacgagaggactgctcggtcaaacagcggatggggtaccacggtaagctgataaacggtttggaaaaaatcgctctggttgagaaggcgttgtagtgcaatacgcgcgggcgaaatctggcaatgggggaagagttttatgaatgaacgaaagtgcatggcgatcttacaaaaggcatatgagagctttgaacgatcggacatggggcggtaccggcagcatttggatatggccagggcagctatggcaagcctacccaagacgcatccgctgtggggggaatacctgtttgcatcctcttttgaatatcagcgagacctggaccggttgattgtcctttatcaggaggcattggacctgatcggtggacgctctcagttgatgccgctagggtctcagatgtttggacgctatttccatatttttgggatatgcaaccctgaactggggcatgcggatgaaaatattaaaaagatcgagcgggcgacggcgctttttaacaagctgacgggcggcggaagcgggacagatatctgctaccgcgcgcagctggcctattataggggagaactacgcgaagcgtatactctagcgcagagcgccttgaacatcgccctaaaaaacgaccagactttagtggccctctgtgctgccgagatgctctctcaggtggccaagcatgaggaggattatgagctatggcattttgcattgggctttatacgctttgttgccgataacgacgcgcctgagatgaaaatctgccgggagcatgcgcagatcatcctggcaacctcggatctttgcctgggcatcctgcaccgggtgccggactggatcaaggacagcgactttggcgccattcccttagaggggcactacgaggtagttgacaaacgtatgagctttggaacgatctcccatgcgctagcagcacggatcgagtactactgctacggtggccagcccattaaagccctgaattccatttatatgaccagcaaggtctactgtattgacagccgattttttgacctatatatggattttttgagcgcggcctgctacctgcagctaaaccgggaagagcagatgataaaagcgctggaacagggtatagaaaaagtagcgaaggacggcctgtggctgttggcagcggagtttgaaccagcctttggcaagatcctgctggatatcgtcgcccgttacgatgctggcgccgtggtaaaggtgcgaaggttgagtaaggattttttaaagaagctggcgcagctgcgcaaaagcaatttggtggatgcgagcgtgcgcctgaccaaccgggagagggagatcgccgggctaattgtacagggaagatctaacgcggagatcgccgataaactgtgcatagcggagcgcacagtcaaatgccatctggagcacatttaccgcaagttgaacatcaaccggcgcagcggcgtggcggtggcgctgcgccaggcgcgggccacagaattggccgtatgggtacgccggcagaccaagtaattcatacttttgaccgggtaaaaaaattgatctggcggccaatttatggaaaaggcttctctctttatcatgataaagagggaggagtatgttggccgcctgattcgtttccccaacaggggagccaaatttacggggaaaaattgggcagacaacctccttctaaagcaatcgttatagaaggaggttttttatgcgcaagcggatttttgctgtgttcatagccgtggcgatgttgatcggcatggtgccatcggcagcctttgcagcgcagacgggggagacgccggccgtcaccaatggcgcctatacagacggtgcttgggcgtccggcggtacaggagaggtgacctatcagatcaacggagaggacgtcgtgctctccaaaacagccgtccctgttgcaggagaggagaacgtctttgacattacacttaaagtccagacgcaggccagcgaaaccctgagcactgactctgcagctgtggtgctggtgatggacgtatccaactccatggactggtgcgccgagtgcggcggtgagagatcacataagaagaattgtaagtactataataatgattggatggaaaattgggtaacgagtgcccagagccgtatgcaggcggccaaggacgcggcgaagaccttccttgcctcctacgccggcacggatgcaagcgcgaaccggcagctttgcatcgtaacctttggcagtaacgccaatacgctattctcctggagcaacgtagctggcggcgcggataaaaacagctataatagcgccctgtccgccatcaacaggctggggaccaatggcggtaccaacttggaggctggcttgagcactgctaacacgcagctgagcgctagcggtatctccgggatcgcttcaaagagcgtcgtgctgctgaccgatggcaagcccacctatcgtattgacgggggcaatggcagcgatggcagccagcaaaactgcaatgcagctaagaacgctgccgataagatcaaggccaacggcaaggcggagctatacacggtctgttttggcgccgccaaggagaccgcttactctggcgggcctaccgtgggcaacttcctgagcggcagcatcgcctcctcggccagttatgcctacaatgcggataacagcgctgcgctggcggctgccttcaaggccatcagtgaatcgatcaccagcggcctggatggagagggtttacaagctactgacccgatgggacggtacgtcagcgtggtctccggcgcatcggacaccttcgtatccgatggcaacgggacctatacctggagcctgacggatgcagacgtttctaccagtggcagtaccaccacctatacgtatacgtatacctatcgcatcaaactggacgtacagggccagggctttgtggagggacagtactaccccaccaacggggaaacctatttgacggtggaagacgagacgtacgccttcccagtgccgggagtaaaggggacgctcccgcgcacccaggtaaccgctaacaaggtctgggcggatcaggacgatcaggacggtatccgtccccagagcgtgaagctgcaattgaaaaaggatggcgtgccttatggcgcctctgtcacgattggagcgcgcgataactggagctacacctgggaaggactgatcgccaaatccggcggcgtcacccatgtatatagcgtagaagaggtggacatcccaacggactatggcgttgcctacggtggcagcgcggccaacgggctgacggtgaccaatacccatgaggtttacacggtagatgtagacgtggaaaagttctgggatgacaacgacgaccaggacggtctgcgccccgacgcgatcaccgttgagctttatgcagataaacaatatacgggtaagaccgttacgctgaacgatgcgaaccaatggaaggcctccttcaccggcctggataagaacaaggccggcaacgagatcaactataccgtggctgaggccgctgtgccccgggggtatgaggccagtgtagatggctatatcatcaccaacgtacacgaaccggcgaccatggatctgccggtcaccaaggtgtgggaagatgcgcggaatcaggatggcatccgccccgaggcgatcgaagtgatgctgctggccaatgggaatgaaaccaataaaacggtatccctcaacgagaataaccagtggacagccagctttaccgacctggccgtgtacgccaaggggcagcccatccaatacgcggtacaggaagtgaacctgccgaagggatacgactccgaaatcaacggcagtatgcaagacggatttgagatcaccaacacccatgaggtggagaagatcaccgtttccggcgccaaaacctggcaggatgcggacaaccaggacgacatccgcccggatttcatcaccatccgcctgctggccaacggccaggaggtagccagcaagaccgtcaccgcgcaggataactggcagtggtcctttgaaaacatggataaaaacgcgaacggccaggcgatcaactacaccgttaccgaggatgcggtgacggattattctaccagctatagctataatggagtcaacgtgaccaacacccacagcccgaaaaagaccagcgtgaccgttaccaaggcttgggaggatgagggcgatcaggacggtatccgtcccaatgacgtcacagttgagctgctggccgacggagagggtaccagcaagaccctgacgctgaacaaaggcaacggttggaccgcatcctttgagcagttggacgtttatgccgccggtaaggtgggccaggcagtgaactatacggtcagagagctgaacgtgcccaaaaactatatcgccgaagttaccggcagcgccaaagagggttatgtgattaccaatagacatacccccgagatcgttactgtttctggcaccaagacctgggatgatgcgggggataacgacggcaagcgccccgatgaggtcacagtcagcctgctggccaatggacgcaagattgacgaggcaaaaatcaccggccagaatggctggcgctatgcctttgagaacctgcccaagtatcagaatcatggacagctgatccaatacaacgtcgtggaaaccgcggttaaggattacagtaccagctaccacctggacagctacgacatcaaaaacacccatacgcccgagcagaccagcgtgaccgtcaccaaagcctggctggatcaggacgatcaggacggcatccgtcccgatgagatcaccgtttacctgctggcagacggagagcggacgaattacagcctgacgctgaacgcggataataactggacgggtacttttggtcagctgcctgtgtacaaggcgggagagcccgtcgcctataccgtatctgagaatgggaacgaaggctatagcagcgagatcaccggcaacatgaaagagggttttgtaatcaccaatatccatgaggtggagaaggtgaccgtgtcaggcggcaagacctgggacgatgcgaacgaccaggatggcaagcggcccgattccatcacggtccgcctgttggccgatggccggcaggtcgctgaaaagaccgtaacccaggcagacggatggcagtgggcctttgaagatctggacaagaacgataagggccggcagatcagctataccatcgttgaagacgccgtagagggctataccgccagcgtagaggggtacgacgttaccaatacctacgcaccggaaaagaccagcgtaatggtggtcaaggcctggagcgacagcgacaatgccgacggcctgcgcccggacagcgtgaccatccgcctgttggccgatggaaaggataccggcaagaccttgacgctgagcgcagccaatcagtgggccggcgtatttggggagttggacgtctacgccgcgggcgagaagatcgcttatactgtcgaagaggtggcggtagagcattataataccgtcattaccggcgatgctacggtgggctttgttgtgaccaatagccactctgtcacgcccaagaccggggatagtaatatgatcttctatcttgcgctgttggcagtgtctgcccttggggttgcagccacctgcctgtatgcccgcaagcgcagcctgagaggttaaccgaaggcttaaaccataaataaggggaagcatcaaaaacgccctgcaagcatactggcttgcagggcgttttagtttgctgcaaaaagggcgctcctatttcattacccgccggatcagccccagctttttctcggtatagggcgggtagcgcagagggatatccggccacaggccctttttaagcacgcccttgcggtgggtgaaggcctcaaagctggccttgccatggtaagcgcccatgccgctttcgcccacgccgccaaagggcagggcgggcgaggccaggtgcatcacggtatcgttgatgcaaccgccgccaaaggaaagggtgcgcaaaaagcgctgctgtacggacttatcctgggtaaagcaataggcggccaacggtttaggcccgctgcgcacctgggcaaaggcctcgtcaaggttggcatagggcagcaccggcaaaagaggcccaaagatctcctcacgcatgatggggctgtccatatccacatcgcccagcagggtaggggcgatcttgcaggtgtcaggatcggtctttccgccggcaagcacccggcacccggccaaaagccaggtcaaccgttcaaagtgccgcggggagatgatcttggggtaatccgggttttgcaaaggctctgggccgtaaaacgtagcgatggcctcgcgcattttatccaacagggggtgaaatacgttttggtggacgagcagataatccgacgcgacgcaggtttgcccggcgtttaaaaatttgccccatacgatgcggcgcgcggccaacgcaaggtcggcagtctgatccacgatacaggggcttttgccccccagctccaggatcaccggggtcaggtgctgggccgcagccgccattaccttgcggcccacctggccgccgccggtgtaaaagataagatcaaagggatgctggcaaagggcctggctcacctccgggccgccctgcaccacggccacgcactccggggcaaaggcctgcgttaaaatatcctccagcacccgggccgtatgcggggcgtattccgagggcttaagcaccgcgcagttgcctgcggccagcgcgcccacaagcggctggaggctgagcagcgcagggtaattccagggcgccaggatcaggcaacggccatagggctctgggtagatcctgccctgaccggggaaattggccagcggtgtggggaccctttgcggacgggcccatttcccaagatgccgctgcagttcacgggcctcggcgtagatcatgcctatctcgcttaaataactttccgcaggggccttgcccagatcctgttccaatgcgcgagttagagcctgctcgtgggcgtgcagagcgtcggtcagcttttgcagctgcgcacggcgaaaggccaccggacgggtatgtcccgcgtcaaaataagcctgctggcgggaagccaaagcttgtagatccatatacgtgcctccttgaacaaaaaagaggcgcttatctgcgcccctttgtattggttcaattctaatgtttaaaatgaagcgttcatcaaccccagcaccagggcgatctgcccggcaaagctcagtatcagcgcagggatcctgtggcggctaaagcgggaggagaactgcggcagggctactaccgcctgtccgcccagcagtagcagggtaccggccacgctccaccagccgcaggccgcgggcaggcgaaaaacgtacagcagggaaaaagccttggtcaacatcaacgtggcgctgatagcggccaacacggccggcaccttcagcgtttcgatccgcagccccgctatacggggaaccaggatgaacagcgccagtatgccgatgaagaacaaaatatccagccagtgcatgccgctggcctgtgcaaaggccatggaaaagatcacgttggccaccagcgcgctgaagaaccccgccagaaaacggggggactccacctgctcatgcatcacaaacaccacggcaaacaacagcagcgctaggatcatcagcagtgcgtagcctaccgctgcctttccggccagggcgccggtggccgccgccgccaggatcaagccgccgcagatcagcagctctaccatcgtcttttggttgcgctcttttgcggtgtggatcatatagaccgttgccatgacggcgaagcccgcaaggaacagataagtgaggatcgagaagaaaacggtcatgtgcaataccacctttcaaacgaggcccgtccaatcgttatcgattaaagctaccccttactcccattataacccatttatcgcccctgggaaaccggagtcgtgtaaataatcggttaattctacctaatttgcaaggcgcaaaagccttgccgcgttatcccccaaaatggcctctttttggctggaggggatagagagcgaatcgatcaggcgcatctcgtcttcgggcaggtgccaggggcaatcgctgcccagcagcacccgctcatagccatggcgggcgatcatttcctgcaaaagtgcaggggctatgaagccttcggcgcaaagcgcggtatcaaagtacaggttggggatgccgcaaagggtctccaacgcctccaaacggcactccatcccacccatatgggcggccaccacctgcaggcgggggaagtccgccgtgatcctgcgcagcatggcaggcgtggtatggatcagcttgggcgagagcggatcgtacccggcgtggaacacgatgggcagccccagcgcctgggcctgctcatacaccggataggcagcccggtcgtcggcccggtaatcctgataatccgggtgcagcttgagcccgtgcaggcccatctcccggatacggcctacccagtcggccgcgccggggtcggtggggtagaccgaacccatacagatcagcctgtccgactggatctgctgggcaaatttgtttaagctctccgtctgcccagggcgggtggcgatgtgctcgatcacccccgcgtccacgtcgcagcggtctaaaatatccagcgtatccgctaccgtgcctgcaccgcgggggaccataccgcaggtatgagccagcccggccagtgccttgggggcaatagcgtccggaaacaggtgcatgtgaaaatcgatgatcatttgacaagccttcttttcaagagtctagggcccgtcccatttgagcatacccgcagggacgggatttatacagcccgcttaccaggcggatgcggcttactaagccgcccgtgcaatcgtgcgtcagctcgctttgcaccggcatatttcaggcggagggccttactcgccggggaagcggtagtccaggatctcatcatccggcggatagtccgggttgccccagccggggccaaagggtacctccggcatgccgggcaggatcagtccgccatccacccgcagggtggtgccggtgatgtaggacgctttttccgagcacagaaaacgcacggcgttgccgatgtcactaggctgccctgcccgccctaaagggatgcgcgcgccaaaaccctcggaaaacgcctgtacctccggcgtatcccgggtctggatatagcccggggccacggtgttgacccggatgccgtagcgcgccagatcaagggccatcccctcagccgcgcggcagagcgcagccttgatcccgccgtagaccgcatcctccggaaaggcccgcgtggcccgcacggaggtgatcattacgatggcgcccggcctgcccgcggagatcatcactttggcggcggcctgcgccgtaagcaggtagccccgcaggttcaggtccatcagcgtttgcatctgctccagaggaaaatcctgaaacgggtaagtcagcgtgacgccggcgttgcacacagccgcgtccagctgccccagcgcctgggcggcccaggccacggtttcccggcaatcctctaccttttccaggttggcctggcggcaaaaggcgcgcgcgccatagccttccagctcacggcagagcgcctgcgcttccttatgcgcgccgcggtaggtaaaggccacgtcatacccatccagggccatacagcgggcaatgccgctgccgataccccggctcccgccggtgaccagtacgcctttacgcatgaatgatcctccttatcttttatgagggcctaaaaaccggcctcttcatcgttgcctacgtgatcctcccgataccaggaggcgcggcgcaccccctcgcgcagggcaagctcgtgcaccacatactcggcggtggcatcctgcggggtgcgctgacgggcatacaccgtaaaatccacaaaaccgtccttggcgtccttgctctccagggcctgcagctgcattttctggtcgcgcagcatttgcgccaaatcgccgcgcagggtccactcgtcgctctggcggcaggtgatctcaaagcggtacaggcagccatagcgggtattctggctgaagttttttgcagagatgtggttggaaaagggccgcagcaggatattggtcagcagtaccagtgcggtggccatgcaggcaaacatcaagtgcccggcggccagcagcacgccgatggcggcggtgcaccacaaggtggccgcggtggtcagccccttgatggtaaacccatcgcgcacgatcacgccgccgcccagaaagccgatgccggtgaccacttgggccgctacgcgggaccgatcccccatttcctcatcgatcagggaaaaaagtacgaaaagacaggcgccaacgcagaccagcacgttggtgcggatgccggccatatgccggtgcatcagccgttcaaggccgatgagcgcccccagtacgccggctaaactgatgcggatcaaaaagtcggtccagaccatgtagaccgtctcctcctttgcaaggaacgcagggttcctttacttaaatattgaatgttaacaagattataggccatttaccccatgcggcacaagggcaaggcgcaaggttgacggcattttccttcatgatgtatgataatgaaggataaagtatgttgatctggccctaaaatcggggcctttggcttatagaaggggggcgcggtatttgatcgccagggtattgcgggggatcgtcacgctggtgggcgtgctggccgggtggagcctgggggtcgtgatgctgggcttcaactttctgggcgggggcgagttggggcggtttatgcccttttgggggcatctgattttggtgctgacctgcgcggcagtgggcggggcggtagcctttttgctggcgccgccgctttttcgcgcggtgtaccgggcggccggggcgctggagcagcgcctgagcgccacgcccattgcggacctggtggcaggcgccctggggcttttggtggggctggcggtggcctttatgctctcttttctggctaacgatctgccggtcttctggctgagcgtggtggtcaagctgtcgatctacatgctgctggggatgctggggatgcggttggctgtgcgccgccgcagcgaactgatggattactttgctgcgctgcgccgccgcgagcaggagcgggccgcccaggccgaggggcaaaagcccccggcggataaggtgctggataccagcgcgatcatcgacgggcggatctttgacgtggtgcgggcgggctttgtggacgggcgcttgtctgtgccggattttgtgctgcaggagctgcggcacattgccgattcgccggatcctttgcgccgccagcggggccggcgggggctggagatgctcgaaaacatccgccaggaactgcccgcccgggtgcatgtggtgcgccgggagcgccggatgggtgaagaggtggacgcggcactttgccgtatcgcccgggaagaggggggctgcgtggttaccaccgattacaatctaaataaaatggcgggggtacagggcgtgcgggtgctcaacgtcaacgaattggctggggccatgcgccagcgcctgctgcccggggagcagttcgccgtgcagatcctgcgggagggccgggaaaaagagcagggcctggcctatctggacgatgggacgatgatcgtcatcgagggcggcaggccctatattggcatgcggcgccaggtagaggtgacaagcctgctgcagacggcggcgggacagatggtatttgtgaagttggtgtaacatatttgtatatttgtctgcctttaatctggagcgattgacttcttctcctgcggtttgtataatgggtgtcggctattattacaagcaatgaagagaggttatcggtttggaacgaatggagaatctggaaacggatcagcatcctttgccacaggaaaatatcgtaaaatcccaaaggcattttggtcgagcgctgggacgggcccttctttactggcttccagtattgatggtctgcatttttcccgtcgcttttttatatgggcaaaatgcgggtgaagctgctatacaggaaacttttgagccgttaatggtatttatatcgattggtacgggcgtttacgcgctttgtgcgttgatctttcgctcggtcagaaagggcgcactaggcgctgctctgctgatgttggtgtttttaaattttcgctacgccaacgcggctgcccgcatggtctttccagagctgcgatactggcatgtatgtgccttggggctatttgtcatgggacatatcatttactttttgggcaaactcaaggcggatacacaaaagaatatcctacggattattacggtagtattcggcgggctggttctggtcaacctggtgttggcgataccccagatgacccagcggatgcagggacaggcggatacatcggcgcccgtgcaggagcaggtcgccgccggggaggacaaccccaatatttattggctgatctttgacgagtactctagctttgaagtcatcgatcaggtttatcaatacgattaccggccctttgatacgtggttacaggacaggggcttttctgtagtgcacggcggttctaacgagggttacaatacagataggatactgaccaactatattaatatggattatcttgttaccgaggaaatgagctatcaggaaaaagcggaggttcgggaatcgccaaacggattgctgaaatcgctgctggcgcaaaatggttatcaggtcaagcctttgggcaatgcggcttatttcttcggctgggacgatacgggcaatgaaggagaagctgttacggtttccggcgagaaccttagttacctgttataccacaatacggcattgcaaccctttgtgcagttggatagcaatgagagcaagcagaagatcatcaatacaatggattggtttaacgatgccaataattacggcgttaagaatcgctttgtttgctcttatttagaactgccccatcagccattctactttgatgaaaatggcaacagcgtcgccctggcggatagtaataactggaaggacaagcagatttacctgggacagtataactacaccaccaaacggatgatgcaggctgtagaggcgatacaggttaacgacccggaggcggtcatcatccttcagtccgaccatagcgcgcgtgccgcctcggatgaagaactatttaaaaaattgattccagagccgctgatgcgcacttattttgcagcggtttatctaccagatgaaaagcttgagctggatgggcttagcggcgtgaacgttttgcggcagacttttagtcgcgtgtttaacgtggatctgcccgcggtggaggtgcctgacgtggaggtgacgaaggatggtaaataaatttacgggctatgtcaggaagcatcccaaaaaagttgtggcatacctggcctttgtggttgcatttgtagtgctgctgctgaacatgaatgcaataatagcggctgtattctgcggggatgtaaattgggaaaaaacggactttgccgcctggcagggcaacagcgaggcttttgtaacgcttgacgagcaatttcctcagcacgatttactcgatacgctgcacttgagcggcgcagccttttgtgaaacgcaggcagataattccgacaagtatcttatggttatccttaagggcgaaaaagatacatacggccttcgtattgaggctcggtcgatgaggcaataccgcgggcggttcatagatgaacatcccaaccttatgggagataggatcgggattttggaagagatcccaacgctggctctccctaatgatgattaccacctttatatctatgtgtgggagaacgagcagaataatggactggcggatatgggcacagtttaccgcaaggggaatggaaagatcgtggagctagaatcctaaggcaggataaagaattgatttgacggcggggcgtttatgcgccccgcctgttttttacccccaaaagtttacaccgcccatacaaggcggatacagcgcttttgcatcttaaagcggcgccatggtataattgtaggcgtaacccgaccggatgccgggcagcccccggcgcggtgtggtataataggctatctgtaataggataaatcgaatggaaggattttaggcgatatggaggatacgctttatcagtttatagcggggatcatgcgctacgtgtttatcctgctgatctggctgatcctgatcgttaccgcccgcagcgcctggaaggaataccgcctccagcgccgctacatgggcaagcgggtagtgatcgggtacttggagcgccggggcccggagggagcgctggagcgctatcccctggggatggatgcgctgatcggctctggacgtggatgcgatgtacgcatccgcgacgagggattggagcggcgccaggcgcagatttcctgccgggatgacggcgtgtttttgctggacctttccaagggagacccgccggtgatcaacggcgtaggcgcccctgagcgggtgcagctgctaaacggcgaccagatccgctttggagaggtgacgtttcgtttaagactggaggtggagcgggatgcgtgaacattggcccagtgccaacggcctggtcttcgttatcgcggtattccagctgctggccttcgcgcttttggcggtaaaggcgcagcccgtagattacggggcgctgatgctgggggcgctttcggtggcaatattgctgtttcaatacctggtttttgtgcgggtattcccggggctagaccggtggatcctgatcatcgccaacatgctggtatccctgggctttatcctgcaataccggctgaacccggatatgtgcatccgccagatgcagtggtttggcgtggcggtggtgtgcatggtggtggcgctgatcgccgtgcgctactggacgtggttggataagctcagctatgtgtacatgggcgttacgctactccttttggtgttgacgctgctgtttggcagccgggagggcggggccaagagctggttcagctttggcacggtcagctttcagccatccgagttgggcaaggtgctgctggtgttcgccctggccagcgccatgaaggagcggcgcagcctatggcggctgatccccttggggatatttgccgccgtttcggtggggttattggtgctgcaaaaggacctgggcgcagcgttgctatacttttcaacctctattgtggtgttttatatcgccaccagcaacctgctattgaccggggcggccctgggcgcggcgggggtaggctcggtagccgcgtataagctgttctcccacgtgcgggtgcgcatcgcggcctggcaaaacccctgggcggacgtggagggcggcggttatcagatcgtgcaatcgttgatcgccatcgccagcggcgggctgctgggcctgggcctgggcctgggcagccctaagagcataccagcctaccatacggactttatcttcgcggtgatctgcgaggagttcggggtgctggtgggcatcgccgttatcctcttttatgtggtgctgatcctgcgcggggcgcgcatcgccctggatgcggggcagaccttttacaagctggtggccatcggctgtacggccatggtggcgctgcagaccttcatcatcgtaggcggggtgatcaagatgatcccgctcaccggcgtaacgctgccctttgtcagctacgggggcagctcgctggtcaccaatatggtgctgatcggcattctggaggcggtggctgtgcgcaaccatgccatgcgcgaaagcgccatgggcccggtggagattcccggttataatatcgacgaggacgcctattacgatgaggatgcgtatgaccaggagtacgccgactacgaggatgagtattacgaccaggactacgatgaggtgcagcaggactacgaccaggaggacgaatatctgcaggacgggcaggaagacgcggtagagcgccggcaaagcggagaatcgggaacgcgcggcaagaagggaggcggccgtaaatgaggcagatggaccgaaatattaagctgatcactacggtattcgccgtggcctttagctttttgctggtctactttggctatcaggtgatgacggagggcgggcgctggttcgtcagccccagcaaccaacgcctgggtaagcagctggagaacatcacccccggcgatattttggaccgggcgggcacgacgctggcctccagcgacgaaagcggcaaccgcacctattcggatgacgcggccctgcgcctgggcagcgcccacgtgctgggggaccataccggctacagcgccaccggcgtgcagacctaccatgccaatacgcttttgggctttaataactccctttcgggacaattagggcagctgatgggcggcaaacgccagggctcggatatgcggcttaccttgctgagcagcatgcaaaaagcggcctgggagtatttaagcggcaaaaagggcgccgccgtggtgttgaactacaagacgggagaagtgctctgctcggtctccagccccgcctttgagccggccaatgccgcccaggaggccaagggagcggacgccgaaacgaacggcatctttgtcaaccgagtgacccagggcaagtacgcccccggctcgatctttaagatcgtcaccgccagcgcactgctgaaaaacgacatgggtggtttgacgcacacctgcacgggcaccctgcagctgcccggcggcacggtgacctgtgaggaggcccacggcgcctgcgatctgaataaggcgatgacggtatcctgcaatacctattttgccaatgccggcgtaaagctgggctacagcgccctgctttccgcggcggaggatctgggctttgaggatgattttacctttagcgacctgtctttgtacaagggccgcgtgcccgagccggagaacgactttgagctgggctgggcctcggtaggccagaataaggataccatgacccccatgcaggccgccatgatggtgggggctgtagccaacgacggcgtgatgatggagcccaaattggtgttggggatcacagaaaacggcggggaggagaaaaatgcgctgaatagcaacgtataccgtacctcgatgaatgcggaggtggcggacacgctcaagagcatgctgctgggcgccgtgcaaaacggcaccggccgcagcgcccaggtcaagggcctctccatcggcggtaaaaccggtaccgcggaggtatccaccaataaagaggtagccccgcatgcctggtttgtcggctttttggatgacgaaagcgcgccgctgtgcgtggcggtgatcgtagaaaacggcgggtacggttcgggcgctgcggcaccgctggccggccagctgctcaagatcggctcggactattaccataccaatggataaagcgtaaacagcatgcgcccgggaagtttcccgggcactttttttatttacggacaagacgttgctgcatgaggcaatgatttggggaaaggtaaaattgataaatttctaaaataatgttgacaaatatagaataaaaacataaaatagaattgaaaagaatacaatttaaaacaagaaatacataattaataatagatatataaatatctagcacatacataagcactaccttaaaaatattttcgtaaataacatggcggccaagcgtgaccgggcggcggaaagggggctgatatacggatctgcagcggcccgtgccagcaagcgacgaagcgaccatgcgttattaagattacacaaaaacagggggaaaagaataatgaaaaagattatggtaggggcaatggccctggcgcttagcgcggcgatgttgctaaccgcctgtacagcgcaacagagcagtccgccgacaggatctacggcggcagagaacacgtcttcagccgtgcaggagaatacagagcccgtgacccttgcattttgggatatgaactggggttcatccaattaccctgctgctgcggaagcgttggccaaaaaatatacagaagtagcctcgaacgtaaccgtcaattacaccagcgtgccatggggtaactggtttgaaacatattcgaccgctgtggcttccaacggcgcgccagatgtggctacgggcggcggatatatgccctttcagtttgcagccagcgatgaaacggccgacctgaagtggatctatgacgaatgggaaaaggaaggtacgttggatgattttcttgaagatgatatcgaatactggaattggaaaggcaagtacctggctatcccttcggataaagactttagaactatgtttatccgtaaggactggatggaggaagacggcgtatctatgcccaagacctgggacgacgtgtacgaagcggctaaagtttttgaccgacgcggtagcgatgtttatggcctctcccacggtgtgacgggtagcggcaatggtgtggtattccatcacttcttgggggccaactatggcggcattctgtatgataaagatggaaatgctaccgtcgataccgaaggcacttatgtgattcaaaaattcctgcgcaaactgaaggacgaaaaacttgtgcccgaaggcatcgagaactatcaaggtgaggacgcctccaaattgttcggcgctgggaaggcgggcatgtttatcggcaataatagccatttgcgtgatttttataccgccggtatgacaaaagatcaaatctctgttgtcccgccgctgacagcgcccaacggcaacagttattctgccgtcagccgcaatgggcaaatggtttttgaagcctctgcgaataagcagacggctatggagtttctcaaatggttcaacgagaacagcgagatcctctggacggagggcgagcgtaacaatatccccgcgaggatcagtatccagaataacgatatgtttaaggatgatttccgcaccgaggtcattaaaacctatgccccggtaggccatcagttcctttggccggtcacccacggcattcctaccggctcctatgttgaggggcagaagatcgacatgcagctgttgcagggcgcctacaccatgagcgatgatgattttaaggcgctgtgcctgaaaatcaaggccgacctgcaagaaaatatcgacaatatggatcaataggttcaggcttattgaaagacctggttaaaccaaagcagagggaaaagggacgcggcgggcaaggcgtcgcgtcccttggcctgccgcggtggaatagaaacgaaccaaacaaacggggaggaaaaggacatgaagatcacaatttggaacgaaaactggcaggatcggttccaggacgacgtcaaggcggcttatccggagacgatccacggagccatcgccaactttttaaaggcgcggggagataaggactgggagatccgcatccgtaccatggatatggaagagtgcgggctgaagcaggaggacctggacgatacggacgtgatgctgtactgggggcatttaaaacataaggaagtgcccgatgagtacgccctgcggatcgccgagcgggtgcaccaggggatggggctaatcctgctgcacagcgcgcacgcctccaaggcggccaagtacctgatcggcggtggccacgggtgcgggctgacctggcgggaggacgacgagcacgagcgggtgtggacgatcgcacataatcacccgatcaccaaagggattccccaggcgtttgtggtaccggcggatgagacgtatgcggagcccttccatatcgatacgcccgatgagctgatctttatcacctggtatcccggcggcgaggtgttccgcagcgggatagcctacaggcggggcgccggcaaggtgttttacttccagccgggacacgagaccttcccgatctatcgcgagcaaaaggaagtgcaggacgtgatcatgaacgcgatccgctgggcgggcgaggggtgcagccattacgagtttatcaatgataacggcagatcccacggcacccgcatcgagccgtaagggcaggagaggcaaaagccccatgacaggtggaaggagaggtaaaatgtctttgaagttaggcatcatcggttatggaaagatggcgtcgggctggcacgcgaagatccccacacagctgccggaggtggaactggtggcggtgcacgacatcgacccggagcgggtggcggcggccagggcggacgggtaccgagcgtacgacagcctgggggattttttaaaggatgaagaagtcaactttgtattggtggccacgcccaacgacttccacaagccgctggcgatagcggtgatggaggcggggaagaacgtgatggtggaaaagccggccacgctgagcgcccgggactgggaggagatgatggcggtatcatcccgcacgggcagggtgctgaccgtgcaccacaaccgcaggtgggacttggattaccaaacggccaaaaagatcattagcgaagggtttatcggcaaaccccatgccatcagctctacctatcaattatggatgcccggccgcaagctttcgggcctgcgctggcgggatattccggagcacgggggcggcctgttttacgactggggggtgcacctgtgcgaccagctgttgaatttgtacccggaagaccctatcgtatcggtttatatgcagatgcgcaagatccataaagattatgtggataatttcagcaagctggagatgcagacccgcagcggattgcttttggaaatgaatctggatggatacgcgaccgattggctgccgcgttggcggctgtatggcgacctgggcgtggcgacgattgaggatttcggcggcaagcttgggaagatcaccacgatcaactacggcgcagcccaaaaaaacgacccagatggcatgcctgtcgaggcggcgctgcctgtgattgcggtcaaggatgggatcacttccgcgccggagggcgaactgcagcgcgattctaaaggcagcgcaccctgggtggagctgtaccgcaacctggcggatgtggtggacaacggcgcggagttgatcgtcaagcccgaacaggtgctgcgcaccatgaagctgctggacgcggcgttccagtccgcaaggacgggagaggtgatccacacggatatttaataaagagaagcggccctgatagaatccctttaatctatcaggacgtgttccccctcatcatgcggtcgcttcgatacggccgcagacccagggcacggcggcaaggccgtgccctattttttataaaagtgtgatgcggctgtggcccaataaaaaaactagaaggggtattgatatggcacagccgcccaaacgcgcattgaagcgtattgcaaagcgcaaacgtaaagcttacggaacccgccttacgttactttaagtacttctccagagccagataatctccgcccggcggcgtaaagcccagggcgcggtagagtggcaggcccataggggtagccttgaggtctacccggcaaatgcccctggctgccacgtccaaaagcaggtgctgcatcaccgcgcgtgccagcccctggcggcggaaagacgggcgggtgtacacgtttagtactgtgccggtcaatccagtagggaaagcggggctgtagggcttctcgctgacgagcagcagcgcgatggccgccgtctgccccgcagcttcggccaggtaggcgtgcaggcaactgcctaggttgcgggcaaaatagcctggcagccttgcctgcagcgccgcctcttgtgcctgcgttaacgggcccagatcctcttgcagataggcgcgccgcaacgccaccagtgttggtatgtctgctttttccgcatttcgtatcagcataaacgctacccccttagacaatattatacgcctatttcacaccgcggggctttaaataagcaatagagctttaaaaaaagccgcgatttatggtacaatggacgctggtgtcctatctattaaacttcatttggaaagcgggaatttcaacgcatggaacagagaatcggcgcgccattttatcgtaagttcttccgcatctttatcgtactggtactacagaacatcgtgaccttgagcgtaaacctggcggataatatgatgctgggcgcttataacgaggctgcgctttcaggggtcgctgcggtcaaccagatccagttcgtctaccagcagctgctgatggcctttggcgatgggctggtgatcatctgcagccaatactggggcaggcgccagaccgaaccgatgaaaaagatcgcctcgatcgccatgtgggccgggttggggctggccgtattgctgtttgcgctggtcagtttcttcccccatcaggcggtgggcatctttacgaccgatgggcccatcatcgcccagggcgtcgaatacctggcgatcatccgctttacctatctgtttttcgccgtgacgcagatcttgctggccacgctgcgcagcgtgcagatcgtcaagatcggcttctacctctcggtgatgacgctactggtcaactgctcgatcaactatgtgctgatctacggtaatttcggcgcgccggagatgggggcggcgggcgcggctatcggcacgctggtggcccgcatcctggaaacggctgtggtggtcctttatgtgctgcggcataacgagcagctgcgtcttaaactgcgggattatttccactttgataaggtgctgggacgggattattttaagaccaccctgccgcttttgatcggctccggactgtgggggctgaataccgccatgcagacggtgatcctggggcacatgacggcggcggccatcgcggccaacagcgtggcctccaatatcttcctgatggtcaaatccatggcggtgggggcctcggccacagcgaccatcatcatcggcaacgccatcggcgagggtaatatcgacctggtcaagcgctatgccaaggtgatgcaaaagctgtttttaggtatcggcgtattctcgggcatcctgctgtatctcatccgcgtgccgatcttaagtttttacgagctctcgcccgaaaccatggagatggccaacaacttcttattgatcttaagcgtggtggtagtagggatgagctaccagatgcccaccaacggcggcatcattcgcgggggcggggatacggcctttgtggtgaagatggacctgatcagcatctggggtatcgtcatcccgctttcgctgatcatggcgtttgtggtgcaggccccgccgatcgtggtggtgtggtgcctaaatgcggatcagctctttaaatgcataccggcctatatcaaatgcaaccatggccactggattaaaaaactgaccagggattagaaaggacgccgggcgatagggctaaaaatgaaggacggatcgatatgatccgtcctttttttgctgccttttttatcgtactaccgcgcatcccccaggaaaaagagggctaccgtgcccggcccggagtgggtgccgaccgccacgccgatatggttgacgataaaggtcttagcggcggggaatttttccatcaccatctggcgcacatactcggcatcctgctggcaatcgccatggctgataaagaccacgctgttatcccagttgcccgagagcttgaccatgttgttcaccagctctttaagcgaacgtttgcgcccctgtactttataaagggggatcagccgtccctcgtcatccacgtgcagcacgggcttgatgttgagcaccgagccggccatggccgccgtgcgggatacccggccgccgcggtacaggtgcatcaaatcgtccaccgtgaagtagtggcacaaatgccccttggtatcctccacgtattgggccacctcttcaatgcccataccggatttctgacgttggcgggcgtagtagaccatcagtccctcgcccagagaggcgcaaagggtatcgatcacgatgatcttacgctcaggatagcgctctttaagctcctcagcagccagacagcagctggcatagcagccgctaagggcgctggaaaagctcagatgcaatacgtccttgcccgccttgaggtactcctcaaaggctgcggtggcctggaccggggtgatctgcgcggtctggggcatactgcccgcgcgcaccttggcataaaactccgtaatggggaggttgacactgttttgatcgtaacttacgccatccagcgtataggggataaacagtacgccgatgccgttttcacggcagaattcctccggcaggtcggcggtggaatccgtagtgatgacaaaaggcgcgccatggtttgcttccatctcatctgactcctttaggtaggatatgggcggtttataccgcctatttatctcattataccggcttttgccttaaattggaatacccggcgggcaacttggggttctccggacggatcgcgtgcgcgggcgccgtggcaataaaaaacccgcccatggagaccacgggcgggttttgggggcttggcttattggcttattcggccaggccgtactccttaacgttataataggaggcgcgcaggctctccataggagtgaggaagttgaactcatcctgctccataatgccccaggtcagcccaaactccaacgctgccttcatacagccgcggatatccagcacgccgctgcccacagcggtgaagtggctatgatatttttcatcccaggccttattcaacggcgcatactgatagtcttttaaatgcagggcatgtaggcgcgggccccactcatagatcacgcgtaccgggtcggccccgccataggcggcccaggccacatccagcagtacctgtagatcgtcggtattgcgcatcagaatatcaaaggcgggcaggccgttaaatacctgcttaaactcgggggcgtggttgtgatagcgcaaggtcagcccctcttttttcaggtcggcgctggctttggccaatacatccacgtccttcataaaatcatcataggtcagggtcttgcccttgtggccgttgaggatgcagcaggcataaatgctgacgttgtccacgcccagctttttggccttttcaggcaggccggcgatgccgttttgagttagggcgtcgatatcggtagagactgtcagcggctctaatcccatatcgcgtaggcgctggattttgtccatgccatccgggtcgtctagcatacgaccggcatgttcgataccctgataaccgacttcggctaacgtcttggcattctcccaaaaatcgggctgatccgggcggatataacctacaaagccgattttcatcttcttgttcatgaatatttcctccttaactttgtatgttctcccacaagaatagttcaagcagtgggagagcgaatgtcaatcattgcgttgcaatatgcgtgcacgcgcacataaatcacgggtaaaaagcagcccgcgattgtaggctgctttttatgtaaggcctattcggccaggccgtactcttttacgttgtaataggaagcgcgtaggctatccataggggagagctggttcatggcatcctgctccatgatgccccaggtcagcccaaactccagcgccgccttcatgcagccgcggatatccaccacgccgctgcccacagaggtaaaggcgctgtggtaacgctcgttccaggccgtgcgcagcggcgcgtactggaagtccttcaggtgcagggcgtgcaggcgcgggccccactcatagatgatgcgtaccgggtcagccccgccataggccacccaggccacgtctagcagcacttgcaggtcatcggtattgcgcatcaggatatcaaaagccggaaggccgtcaaacacctgtttgaactcgggggcgtggttgtgatagcgcagggtcaacccctcttttttcagcgccgtgctggtttcggccagtacgtccacatccttcatgaagccgtcaaaggtcacgtgctggtcgcggccgcggtgcccgttgaggatggagcaggcataaacgctgacgttgtccacacccagcttggcagccttctcgggcaggccggcgatgccgttgttggtcaggtaatcgatatcggtagagaccgtcaagggctctaagccgatgtcgcgcaggcgcttgatcttgtctatgccatcttcctgctccaggaaagcgccagcatgctcgatacccttatagcctacgtctgccaaaattttagcgttctcccaaaagtcgggctcgtccggacgaatgtaacctacaaaaccgatcttcatcttcttatccatcgtgtagtcccctccttaataaattgagtgataactccccgcttccaagtttaatcggtgagcaacaccctgtcaataggaacatttttaaatagagtgcaaaaaccttcgcgagagggctgcacgcggtctattggcccgggggacggggttaacgggcaagttcgccttcgtgtaatggaacgcccgcctttcgcagggcggcttgcagtaccggcacggataacgctgcaaaattcccagtcagcgccgcggcagtgcctgcggcctgcccggttaccgcgcaggccgggatcacccgggagatatcccacatggcgtccgtcacgctgatgcagcgcccggcactgcacaggttggcgatatggttcccatataatgtgcgatagggtagctcgtagaccgggccgggcttgcgccagtcgccgatcatgccgatgctgtcctcaaaggggatgtgcacctgcgtatcgtccagcgtgcaggcgccgtccaaccggcgggtcatgcgcacctgcggggtggtagcgatgttggccagggcgtgatctgggctaatgccgccctccgaaagaaaatcggccagaatattggcgtgggaggcgcaggtcatctcactgagctcctgcgcgtcaagaccggtatagcgccgccctttttcagccactgtgcccggttgcttatacttgtccggaatatctgcaaatcccaacatacgcagggcaaagcgccggcctacatgctggtaataccaggaggccagcacattgccttgggcgaaggtggcggtgtgctcgccggccaggtggcaaaggtccgcatcgccggaagcgtcgacaaacgaacgggccaggatggcggaccggccggacttgttctcaatgaaaagggctttgatccggccgttttctacctttgcgccgcacacggaggtgccgtagagcggggttatcccctcttggaggagttgttgctcgcacagaatggcaaacaggttggcgttgaactccacctcaaagcgttccccacaccgggcctgagggctacctccttccagccaggcagggcagaagtattggctgtgatggtcgcctgctggctcatagccgtggcgcacggaaaggcgcagcagttcctcggccagcccgaagctgacctggcggcccatcccatcgcaaagcgggagatagatggcgatcagccccgccgtggccagcccgcccagcagaaattgtttctcgatcagcagggttttggcaccctgccgccgggcggccagcgctgctgcaatgccggcaacgccgccgcctacgatcacgacgtcatactctccggagatggggacgtcgcgggagggttcggggatggtgtgcatgagggcacctcctaaaaatctaaatgctgtggtgtacaagtatagtatataatgattttaaagcaagaaaaagccttctgaatattaaaaggggaaagcagcccgattataagttgaagtaagaggagttgatattatgaagccaatcaaatttcgggcggtttttgaaccgtcaatagacggatattgggtttattttcccgaactgcccggttgtataagctggggagaaaatatcgaaaaagcccgtgaaggcgctagagaggcattgagccttcatctctatggcatactgaaggacggtgaagaaattgaatgtgctaaggaaaaatttcaaatcgatccagagaccgctgatggatttttggtgtctactataacaattgatttagatatggtacttaaagaatttggtgattagtgaagatttacatgtcagttgctactatctaggtgataaacccagatgagaatctatatatgttgacgaactgagtcttaataaattaggccgcagaatcatgtgatatttcgtgtgatatgagaaaccaagtgtctagtattctagaataattttatgacgacagctgaaccgctgagcgctgctgctcgcgccgctccgctgccgaaccgtccaccggacggttcgcctacgctgcgcgccctcttgggggttcgaatcccttggaaatataaagaaaaaacagctctgcaaaaacagaactgttttttggcacctccgaggggattcgaacccctgttaccgccgtgagagggcggcgtcctaggcctctagaccacggaggcataattccgcgcgaccgggtttaaccagcagccgcacgggggacgggcacgaaccgtgccacatgcgatattatagcaagcgaggtagggcttgtcaagcaaaaattgtcgattatttctggaaaaatttttcgcggatgattctggcgaaagatgggggaaaaaggcacgacgatcttgtacaacaaagcgggatagattgcatttgaaccgggtgaaatgatataatttataaaaatagacgtgctggacgcaaggggtttgcacgcatttatgggggatttttaacttctgtgcatctataggcgacgacaaagttaaaggggagtattgaaagatgaagtatacgcttggtgtggattttggtacgcagtccggccgctcggtactggtggaggtgggcacgggcaatatcgtggcccaggccgtaaaggaatacacccacggtgtgatggatgaaaagctgccgtgcggcaaagttttgccgccggactgggcgctgcagcacccgcaggattatcttgaagtgttttacgagaccatcccgcaggtcttgaaggaatccggcgtcgcaccggaggatgtgatcggcatggcggtagactttaccagctgcacgattttgccggtagataaagatggcaccccgctttgcatgctgccccagtgggaggaagaaccccacagctatgtaaaactgtggaaacaccatgctgcgcaggtggatgcggataagctcaacgccattgcccgggagcggggggagagcttccttggccgctacggcggcaagatctcctcggagtgggtgttccccaagatcatgcagatcctgcgcgaggctccagaggtgtacgaggcggccgaccgcattatggaactggcggactggaccaccatgatgttgtgcggagaggaaaaacgcaacagctgtaccgccggctacaaggccatctggtccaaacgggaggggtatccttccaacgatttctttaaggcattggacccgcggatggagaacgtggtggatgaaaaactcagccgggatatctatcccatcggctcgcgggcgggctatttaacaaaggagatggcgaaaaagaccgggctgaccaccaataccgcggtggctgtgggcaatgtggacgcgcacgtgagcctgccggcggtaggcgaggtcacccccggggccatgctgctgatcatgggtacctccacctgtgatattttgatcgcggatgaggagaaaatggtgcccggcatgtgcggcgtggtagaggacggcgtagagcccggctacatgggctacgaggccggtcagagctgcgtgggcgaccactttgagtggtttgtggagaactgcgtgcccgaaagttatgaaaaagaggccagggcgcggggcatgggcatccatcagctgctcaccgaaaaggccagcgctttgaaaccgggcgagagcggcctgctggcgctggattggtggaacggcaaccgctcggtgttggtggatgtggatttgaccggcatgatgctggggatgacgctgctgaccaagcccgaggaggtttaccgggcgttgatcgaggccacggcctacggtgccaaccgcatcatcgaggagttcatccgctcgggcgtgcccatcgatcacctggtggcctgcggcggtattgccgagaagaaccagatgatgatgcagatctacgcggacgtgaccaatatggagatctatatctccgattcgccccaggcggtggcgctgggcagcgccatgttcggcgcggtggcggcaggtaaggctgccggcgggtatgataccatctttgaggcggccgagaagatggccaaggtcaagccccagccctataagcccatcccggaaaacgtggaagtttataaaaagatctacgcggattactgcaagctgtacgactacttcggccgcggggagaacgacgtgatgaagcgcatgaaggccctgcgcgcggaggtgcgccgccatgactaacctgcgcgccctgaaagaggaagtatttgaggccaatctggagctggtacgccagaacctggtgatctacacctttggcaacgtcagcgggatcgaccgggaacagggccttgtggtcatcaagcccagcggtgtggattatgataccatgcgcccggaggatatggtggtggtttctcttgaaggagagcgggtggaaggggagctgaacccttccagcgacctggagacgcatttggcgctctaccgggcgttccccacgcttgggggcgtggcccatactcacagccgcatggccacggcttgggcgcaggctgggcggggcatcccttgctacggcaccacccaggcggactactgccatggcgagatcccctgtacccggcccatgaccgggacggagatcgccagcgactacgaggccaataccggccttgtcatcgtagagcggttcaagggtgaagacgcttcccagtatcccggggtgttggtctttagccacggccccttctcctggggcaaggacccggccgaggccgtgtatcacgccacggtaatggaatacgtggcggatatggcccgggtgagcgagcagctgaccggcggcctgcagcctatgagccaggcgctgctggataagcattattaccgcaagcacggggcaaacgcctattacgggcaggtcaagcggaagtagctttccgctaaggataaaaaagacatcatttaaagggggttcctaccatgtttaacattcctgaggtacgcctgggtgtcgtggccgtcagccgcgattgtttccccattgatttgagcgagcgccggcgcgccgcgctgtgcgaggcttaccgcaaacagggcgggcagatcgtagagatcatgaccaccattgaaaacgaaaacgacgcgatgaaggctctttgcgagttgaaggaggccggttgcaacgcattggtgttgttcctgggcaactttggcccggaaacaccggagaccctgctggctcaaaaattcgatggaccggtgatgcctgtggccgcggccgaggagtttaccgagatattgaagagcgaccggggcgacgcctactgcggtatgctcaactgctcgtacaacctgggcatccgcaacgtgcgtgcctatattccggagtacccggtgggcacggccgaggatatctgcaagatgatcgacgactttatcccggtagcccgcatcatcctggggctgaaaaagctcaaggtcatcgcctttgggccgcgccccaacgattttgtggcctgcaacgcgcccatcaagcccctgtttgatttgggcatcgccgtggaggagaacagcgagctggatcttctggtagcctacgaggcccataaggacgatccgcgcatccccgaagtcatggcggatatggaaaaggaactgggcgagggcaacaagatgcccggcatcctgccccggttggcgcagtttgagctgacgctgctggattgggcccaggcccataagggtgcaagcgagtacgtggcctttgccaacaagtgctggcccgcctttgaggaaaagttcggctttgtgccctgctacgtcaacagccgcctggcctccaagatgatgccggtctcctgcgaggtggatatctacggcgcggtgaccgagtacattatcgcctgcgccaccatggtgccgcctacgctgctggatatcaacaacaccgtgcccagcgatatgtttaacgccaatatcgccggcaagtacgattataccctgcaggataccttcatgggcttccactgcggcaataccccggcctgccacctggtcaagcccgagatgaagtatcagctgatcatgaagcgctcgctggagccggatagcgagccggacatcacccgcggtacgctggagggcgacatccgcccgggcgatatcaccttctttaggctgcagggcgcggcggattgctcgctgcacagctatgtagcccagggcgaggtgctgccggtggccacccagtcctttggcggcatcggtatctttgccatcccggagatggggcgcttctatcgccacgtgctagtagccaagcgctatccgcaccacggcggcgtggcctttggcaaggtgggtaaggcgctgtttagcgccatgaagctgctgggcgtggaggatgtggccttcaaccagcccaagggaatgctgtacaaggacgaaaatccctttgcctgagaatagggtttgacgctagaccacaggacaagatgcaaaaaagccgcctgcaaaatccgcaggcggcttttttgtgatgacataaggctttcatgcaatgccatttttaaacatctaagcttggtaaactgtgcgccggttgtgaaataagcgtgtcaaaacgcatcccgggtgctataataaaaacggccgctatttagagggctacaagttacaatgaacaaaaaacagctgccacaatccccaaaaaagggttgtggctatttcatgcagaggatatgagaggggttgaggaaaattgaaactcatggtgttcattttaaacaaggtggaggtgctggaggacctgctgcgagagttcaatacggcgggtatccatggggcgacgattttgaccagcaccggcatggcccgggcattgcacggcaacgatgaggaaagcccgcttttcggctcgctgcgggcgctgttggacccggggcgggcggagaatcgcacgattctgatcgtgctgagggatgaacaggtacacgctgccgtatccgttatccagggcgtggtaggcgatttgaataagccggataccggcatcgtgtttaccttgcccatcgacctggtcgaaggcgtgcgaaaatagaagggttggagaaaagttggaactgggcgtattattttatcttgcgattatcgtattttgtgggttggcctttgggcggctggccaaattatgcaaactgcccaacgtaacggggtatctgatagccgggttgatcctgggcccctcggtgctggggatcatccccgaagaggcggtaacaaatttccacctgatctcggatatggccttaggattcatcgcgttttccatcggcagcgagtttaagatgagctattttaagcgcgtgggctttacgcctatcgttatcgccatctttgaggcgcttctggccagcgtggcggttaccctggggatgctggcgctgggtaacgacctggcattctccctggtcatcggctctatcgccgcggctacggctccggcagcgaccatcatggtggtgcgccagtataaggccaagggcccggtgaccgaaacgctgatgagcgtggtggcgctggacgatgcggtggcgctgatcgcctttggctttgcggtcaccatcgccaaatccataaatggcggcgtgcaggagaatatgctgctctctatcctggagccggtgtgggagatcgtgcaatcgctgggcatcggcgcggtgctgggggcgctgtttgtggtgccgctgcggtggtttaaaaaggactccaaccggctgtgcctgatcgtggggttcgtgtttatcgccattgcggtatccaacctgctggatatctcggcgctgctcacctgtatggcgctgggcggggttatggtcaacgtctgccgggagggggatgcgatcatgcgcattaccgattttgtcaccccgccgctgtttatgatgttctttgccgtttcgggcgcagagctggagctctcggtcatccccaccatcggtgtggtgggcatttgttacgtggtcatgcgcgtagtgggcaagatgggcggcgcgtggctgggtgcaaagatcatgaaggcgccaagggctgtacaaaaatacctgggacccacgctgatcccccaggcgggcgtggcgatcgggcttacgctggtggcccagtccgccgtgccggagtatgcgcaggtgatccgcgccgtggtgctgtgcgccacctttatttacgagatcatcggccctgcggtctccaaattcaccctgcaaaaggcgggagagatcgtcaccgccccgaaggtaaaagccaagcgggcgggataaatcaaaagcgagaaggcggagttttgcgctccgccttttataattgaaaaaatccgtttgttgacaacctgttgcagatgtgttaagaatagactgtatcctaactgctaaatattattactagatatgattggagaattgtgattatgcaaaacggcgctttatcccgtagcaacagtgtgcaggcgatcctcaaggccctgcgtaaggacattattttttaccgctatcaggacggccagcaggtgcgggagatcgaactggcgcaggagtacggcgtcagccgggcagcggtgcggggcgcgctgatgatcctggaaaaagaggggctgattatcgccaaccccaacggtacgcgtaacatcgcctgtctgagcgagaaggacttgagcgagttccatgacctgcgcgcgcacctggagaccgtggcggtggaacaggtagccgcgggggataaggatatggagggcatctttgaggtggtcaacaagatccgcatgttggatgagggggcgccccagagcgatattcagaagctggacagcgcttttcacggcagcatcatccgcgccagcggcaacaaggccgtgatcggcgcctggaccaatatcgagcaggtgatgtgcgaggtcgcctggcccgacctgcccggcgcggtcaacaccaacgtggaacactttaaaaagaggcacctggacctgtttatgaccctgatgcaggggccggagacagctgtggcggaatataaggcacacctggccagttccagggataaggcgctgaacaactatggcaactttgtgcggcatacccgccagcaggccggccgataaatttgtcggtcgaattgccgatgcaagaccatatacttatattgttgacattattcatcaagccgtgatagaataagataagtaatatcgttaaggtatcttgatcggagagattggatcgtgagaaatggcgccttatcccgcagcagcagcgtacagcacatattaagggctttgcgccgggacattatccgttaccgctacaaagatggccagcagatacgcgaactagaactggctgccaagtacgatgccagccgcgcggcggtgcggggcgcgctgatggtattggagaaggaagggctgatcgtcacccacaaaaacggcacgcggacggtatcctgcctgagccgtgcggatatggacaattatcacgacctgcgcgcctatctggagacggtggctgtagaggaggtcgcccgaggggataagaacatggagggcatcttcgaggtggtcaataagatccgcatgctggatgagcgcaatacccatgaggagatacagcagctcaacagcgactttcacggcagcattattctggccagcggcaataaagccgtgatccaggcttggagcaatattgaggatgtgatgcgcgaggtcacctgggaggatatttctcaggcgacgcgccaggagccggaacatttcaagcaggtccatacggagctttttatggcgctgatgcaggggcctggggaggcggtgcgcatctataaagagcatatggaaaactcgagaatgaaatcgttaaaaaactattacgcattcttgagccacgtacagacgggcgaatgggtagcccaggagctataatgaagtataaaaaaggccggagcaatatcgtgctccggcctttttatatatggctaaggttgctcaaacagcggggtggaaaggtatcgctccccggtatccggcaaaagcgccaccagggtcttgccggcgttttccgcccgctgtgccagtaaaatggcagcccaaagggcagcgccggaggagatgcccaccagcacgccctcgctgcgcgccgcctcgcgtgcggccgcaaaggcatcgtcgttttccacgcgcaccacctcgtcgtaaatggcggtattgagcacttccggcacaaagcccgcgccaatgccctgtatcttgtgcggcccgggctggccgctggagagtacgggcgaggctgccggctctaccgccaccacgcgtacatgggggttttgcgccttaagatactcgcctacgccggtcaccgtgccgcctgtgcccacgccggccacaaacaggtcgacctgcccatcggtatcccgccagatctccgggccggtggtctggcggtggatggccggattggcggggttttgaaactgcccggggataaaactgcccggcgtttgcgcggccagcgcctgcgccttggcaatggcgcccttcatcccctggctcccgtccgtcagtaccagttcagccccgtatgcgcgcatcagcgcgcgccgctcgtgggacatggtttcaggcatgacgatgatggcgcggtaaccccgggccgcggccacggcggccaggcccacaccggtattgccgctggtaggctcgatgatgaccgagccgcgggtcagcttgccctcttgctcggcctggtcgatcatcgccttggcgatccggtccttcaccgaaccagcggggttgaaatactccagcttggccagcagctttgcctgcaggccatgcgctttttcgatgcggtgtagccgcacgagcggcgtattgccgatcagctgatcgacagaatcatagattctggacataatgttcctcctttagccctgcgcgatggcggcaaaaccgtgtgcaaggtcctctaagatatcctctatgtgctcggtaccgatggaaaggcgcacggtattgggccggatgcccgcggcgagcagttcctccccgctcatctgcgagtgggtggtggaggcgggatgaatgaccagcgacttcatatccgccacattggccagcagggagaacagctctaacgattcgctgaattttttggccgcttcctctccgcctttaatctcaaaggtaaagatcgatccgccgccctttggatagtatcgcgcataaagggctttttcatccccggtagccaaagaagggtggtgcacccgctctacctgcggatgattatttagaaagtcgaccactttcagggcgttgtgtacgtgccgttctacccgcaagggcaaggtttccaatccctgcagcaacaagaatgaattaaatggggagaggcaggcgccggtatcccgcaaaagggtggtgcgtatcttcataatataggccagggagccacatgccttggtgaatacggccccatgataggaggggttgggctgggtcaggccgggaaacttgtcgttctgctcccaattgaaccggccgccgtctacgatcactccacccattaccgtgccatggccgccgataaacttggtggccgagtgcaccacgatgtccgccccgtgctcaagcgggcggaatagatagggtgtggcaaaggtgttatccacaattacggggacgccaaatgtgtgcgcaatagcggacaccgcctccaggtcgataatatccgagttggggttgcctagggattccaagtaaacggccttggtgttgggttgcagggccgcggcaaagttttggggatcgccgccatcaacaaaggtggtggtaatgccgctttcccgtagggtattggcaaacaggttataggtgccgccgtatacgctggaggaggagacgatatggtcgcccgccacggcgatattctgtatggcataggcgatagccgccgagcccgaggccgttgccagggccgcggcgcccccttccagcgccgcaatgcgttgttcaaacacgtcggaagtagggttcattagccgcgagtagatgtttccgccctcagtcagggcaaaacgaccggccgcctgggctgaatccttaaacacataagaggtggtggcataaatgggtacggcccgggcgtcggtagccgggtcgggctgctcctggcctacgtgcagggccagcgtttcaaaacggtattgctttttggacatcgtaatcttcctttcagtctgtaatgtgcatggccggcattaggcggacacattcgcccgaaacggaagttttcccgcagcagggtggtaaagtaatattgcatggccacccgtcctttcgtagtttcattaaaagcagtataaaacctttatcttatattgtcaatatgattactaggaaataaacaaaaaagtcaggctgggcgccgttttcccagcctgactttgcagatgcctagagcgatacgctgcgggattccccactcatagaggagaaagtagcctgcggctcttccaagtaaaagacctcaaagcgcccatcgtccggcgtgtacatgtttttaaggccggggcaggctaaaagcatggcggcccgagcctccctgcgggaatctacggttgcacggccggccaggcgcagccaacggtcctcgatgcaggcgcaaaattccacctggggattttgctgcatttgcttgtacacatccttttggttattggtgcaaaagtagaggcggccctcatagatcatggccgcgccaaagggacggacacgtggctggccgccctcatcggtagccaaaaaatacacgcccgcctggtttaagaactgcaatacttcttccatttatgcttgcccctttccagtaatatccttatactacaaagatagaggattaccttgtaaatgacaagtacgatatttagtaatagtaggttacctataagatactattggaggaatcagagaatggaaagccatgataagcaggatctttacctggtgtgcccttatgtgacggcgcaaaaggtcgtagcgggcaagtgggcggtggtggtgttgcaccacttgagcggggggacgctgcgctttgggcagctccagcgcctgatgcccgggctcacccaggccacgctggccaaacagctgcgcacactggaaagcggtgggctggtgcgccggcaggtctatccggaggtgccgcctcgggtggaatactcgctcacgcccatcgggcaagcctttcgcccggtgctggacagcatcgcccaatggggcgaaaaatatatcgcctatatgcagcagcgctaggggttttggctgtcggccagaacggagaaatccttttggtggcgggggatcagcgtacggatataccgcagcgggtgcagtcccagcgccgggaagaggaacaggtagagccctacgctgcccagtagcgttaggatgatcgcgccaaaatcccccagattgcgggcgagcaggcttaggtggaagatgcgggtgcaaagccccaccactaccgccgccacgatggggacaagaccactggccactgccctgggccaaaggccaaagcggcggcggatcaggcacaggctggcgaccactacgatcagggggctgaccaccatgcccgccaggtagccgtaaatatgcacttggggcagcgccgccacaaaataggttacggccagctggcaggcctcgcctatgatgatgtaaaacatgccctgcttttgcagccccagcccgtttaaaatgctcatgcagatcatctgatagtccatcagtatggcggagatggccagcaggatcacgtagacctcgcttaaatcctgcccgtagagcagccgggagagcgagggcgccagcggtacgatgatggccgtagccgggaggatgatcaaccctgtggcctgaaaggccttttggatcttgcggcgcacatcctcccgccgtccctgggataggctttgggacagatggggcagcagcacgttggcaagcgaggtagccagcaccatgggcagggtgatcagtggctgggccatgccggaaacgatacccagggccgaaaccgcctcctgccgggagagccccgcgcacatcagccgctgggggagcagcaccgtgctggcggccgaaaggatgttagtaaagaccgaggagcaggataccggaaaggcgatggctaggatgcgggtgaacagcccgcgacccaccttgcgcgggcgggggcaggcattgcgcccgcacagctcgtgccggtaggccaggctcagccagatcaccaccggaatttcgctgaccacaagcccggagacgatcagcgccgcggtgcgggcgtggtccccgttgcgcaggcagtaaagcaatcccagtacggcggcaaactgtacgccctgctccaacaggttggagatggcggtgtacttggtcttgcggatacccagaaacagggattcaaaaatgccctcaaagccggccagaaagatcacccccataaagatgatcagtgccgggccggtgcgctcgtcgcccaggatatgggcggagatcacgtgattatactgcaccagcggccaggcgcaggcggcaaagagcaatagaaagatcagaatacagctgcgggtcaggctgcggatagcgggcccatcgctatgggtgcgcatatccgcgctcagccgggtcacggccaggcgcacgcccgtcagcgtagcggagatgacgatggtgaagaccggcagcaccagccggtagacccccagcccctcggccccggccagacggcttaaataaatgcggtaaacaaaacccaggatctgcagcgccaccccggaggaagagagcaccagcgcattataaaaaaccgaatctttactgatcttcaaatatctatccctgcctttatgggccatctgccagggccgccggatcacggatgacaaaaccgtttatttaccatatatatcctggggcaaaggaatttagacgggataaaagatagaatggcgagaaatgcaaaaccggcgcttcttatttagaagcgccggttttttagggatttcgcccggcggctttgctgttcttaggggtaaaacagctgccacgggctttggagggtcgcagcctcgaacgcaaagccgcatgaagcggcgagtagggcgcgggcaaggctgcacgaatatttacaagacatgcgcccagtaaagctggtacaggcctggtgataaataaaaagcaatttaggcagaagaatggctcaacgccggtcatacaaaaagaagtatcgaatgaatacataagtcattataacgttcgacttgttatttgtgaagggctatccgtcaattccttaggcgtttgtgcattccgcgtccccgtaagacggggtttgtgcgatgaacgccgccggtaacgaaattcgccaatcagccacattagcgtaggaatacccaactggaggggcaaaacaaagtagggatagaccgcataaatgtgctctgcctccagcgaggtacggtagatccacagggacagcgcggccgtggcaaagatcagcggcacattcagcgctttgctggataccgggatgcccagcagcgtgcttagcgcccggctggcggcgaacaccccaacgcagattttgatgaaccccgccaggatcagattgacgctgaccaaggcctcaaaccgggtgaggaagttgcctgcagagagaatgcgtacggaggaatagcccgggtagagggtatgggagatcgccaccggtcccaggatcaggatattgcgcagggtgctgagcatgaacagcgccgcggtgatggccagggcgatatagagcgcgcggctgggttcctttttgggtttgaaggtatcgaacacaaacagaaatagtaccgtttccccaaaaggggagcttagcgcgttgaacgacccctggatcagatccttgggcggggcctgaaacatgggcagtaaattatggaaatccatatccgtaataccgatgatacaggttcccgctaccaccagcaccaccagcggaaggatatagatgctccactgcccaagggtacgtaccccgctgcgcacgccatataagctgagtatcgccagagcgaagatcatcaggtactgcggcgtctcagggatcgaggtgatctggatatagtccgacagggtgcgcagcgcatgggccgccgtatacagggtatagaggcaaaaaaggatggtaaggaagccgcccagtaccctgccaaagcacaggcgcagcatctcagccccgtttttgccggggaagagggtgagcagccgcgtatacagcacgatcagcgggatggccatgatcagcccgcccagcgtggcgatccacccatcctgataaaggtgcgtgccctctgcgtggatcagcccggtgcccaacgtaaagagcacgaaaaggcagacggcctgcgagcgggagaggatttgttcgtgcataagcgcctcctagtgatcggtccccacgacgggggtaaataatgaggtcagcgaatccgatccgtggttgaccggaagaatctcatagaggataaaccctgacatggatagggcgaggatacagatgtaaaccactgccagccgcctgggcttttccttgcggtgcggccagaaatccacaaaaaatgccagcacgccaaaaaagaggatcagcacaatcgccatggtataacctcccttatatctggaataggcctgcgttgcgcaggttgacggtcaccgtcagctcatagggcagcgcggcaaactcctcccgccaggcggcagcgtgggccttccagtaatccgggtaggcgatctccagtgcccggccaaagcccaggatgtcgttgcgataatgcttttgtgccagggtgagcagctcgtctatgccctgctctactttttcctgggcaatatcctgcaggcgttgcacatcctcgcccaatacctcggccgagcgatggtcgatctcccctagggaaagattgaggttgacctcaatccccatatgcagcgtatctccctcaaagcggggattaagcgagcaatgggtatcataaacttcaaaggagatattgccctggggcacctgtggaaggtgcgtggccaggataccgctcagggactggttggtcaaaagcgtatagaccttggagagctcgggggaaaggtagcccgccagcgcgtcgccatcaaaaatggctgtgccgcctaaaatggggatgggctcttcaatggaatcgtccagcccgatgacgggcaggcaaagggcctgcgcctgggaggtttcaagcatcgtataggcgcggtacagcgcgatatccggggccatggaggcgctgataagatcgctgcgcagactatcgttaatagtaaaagaagtgatcccttccgcaataggagggctcatcagcacatcagaggcgctggcttcctgcgagaccagcagcttcatggtcgagcggggctcaaggtcgcgcaaaaaccagtccattaccggttcgatgccctctttggccagctcttcgcccaaaatgaggatttcacaatggctccagtaaaggcgcttggcggtcttgggcaccgcattgcgcacggcttcaaaaatcgtatcgccctgactttggatataaactgagcggatctcgttgccctgaatgtccgaattggtatccagcacctccactgtcagcttatagcgctttccatcctcccctttatccagcgcggcgcccgcaacgaccgagagggattcgatttcccgggcgtactggcacccggtcatgggcagtagggtgcatgcgatcagcagagcagcaatcattctgtaggcggttttaaactttttcattggctcttctccctggggttaggccccatgcgtacgcggttgcgggataggaaactgggccgggtgcgcatattccaccaaggggcgcgcacggccagatccttaagctgctgccaagatggcttgctcaaaggggtgatgatgggcaggccaaacgagcgcacgttgagcaggtgcagcagcagcgcggccatgccgaatatccatccgtatagccctaaaacggaggacaataccagcaaaaaagcgcggaagatcatcgccgaggatttcagcttgggcaccataagccctgtgatccccgtcatggcgatgacgatcagcagcggggcgctgacgatcttggcctctacggtagcctgcccaatcaccagcgcccccacgatggagagcgcctggcccacccccatgggcatgcggatgccggtctcccgcaaaatatcgaataccgccagcatcaaaaaggtctccagtatcgttgggaaggggacattttggcgcgaggcgctgatgctgatgagcagcggggtgggaattagctcctgatgataggtgaccagcgccacgtaaatggccggtaggctgatggtgatgaaaaaggcgaggatgcgcaaaatgcggctgatggaggcgtataggtagttgacgtaataatcctcatcgctctggaaggattcgatcaacagatagggcgcgctcagcacgatgggggtgccgtccagcagtaccgccacgcggccctccagcagtcttgccgccaccacatccggtttttcggttatacctacggtggaaataggggaatagggcgaatcggtaatgaactccgccagatagttgacgtccaacaacccgtccatatcaaaggtggagatgcgctttttcacctcttccaccatctcgggtttggcgatcccctcaatgtagcaaaggcaggcctgggtatgggtggtatcccccagggactggaatttcatcttcagccggttcgagcggatgcgccggcggatcagggaaagattgatcatcaacccttcggtaaagccctcccgggggccgcgcagcaccttttcggattccggctcggagatcgagcgggtctgccatcccttggtatcgatgatgacgatctgatctacgccgtcgataaaaaaggcggtatccccataggtcacccgctgtaccaggtcctcaaaatccttggccatggagatatcccccatgggcagcacggtggagaggatctcgcttagcggcgccccctcaggcggggcgatgggggtcttcatcaggggataaagcacgttttcgtttaccgtttctccattggctaatccctcaaaataaacgatggccccttgaatggagctgtcgtgccggttggcaaattcgcgtactttcagcacgtcgatatccttaaagatctcccggagcatggccaggttttctgcccgcgatgcggaaaacttcagatccttgagcggtttcccgtcgatgccggtgtagggcaactcggcttttttcttccggacgatgcgttttagctgcatgttcgcgctccccctttctaggtctacattagtatggatgcccgtttggtaaaatattcaggcccgtccccaaataaaagacgggcgcaaaaagaaaaaccgcggcgctggtcgggcgccgcggtaaaagtgaaaccggtaaggaggccgcatgccgtctatgacgggttgtcgtctatttggtcgatcaggccggtcagcagggcagcgtgccctttctcatcggcaatgattttatccagcgcgttttgtacctgcgcatcgggtatctgggcgcggtggcgcctgtaacgggcgatggcgcgcttttcatccgcaaggtttttttgcagcaggcctcgtacatcctgccggtagcagggcattgcgccatcccagtattgtatgtgcccgttaggataggccgctacgatggggtcgccgccccgctgggcgatcaggatagaaagcgtcttaaaatgctgcatttcgtctttggcaattctgcctagcgcttgggcaatgccttcatgcccaatggaaaggatgacgctggcataggtatattggaatatggccgtggtttccgaggcttcatcaaatgcgtcttgtgccaggagagagagccagcacgggcagcagggaccgccaggctgctgggggcggcaggggcaaaggccctttttaccagccacagccgcacttgcaaccgcatttgcacccacagctgaacgcgccgtcgttacaccctacggtatagccggcggtctgggcacagttgcattcgcaaggggcctggcaattcatcgtaccgttgcttttagtgcaataagtgcaaaacggcttgcaccggcaggcgtcgttatcaaaacagccgttgtcgcggttattgtcatccacgatctgccgccaatcgcagtggcgcagcagggccatatccaacgtgcgctcgtcgccgcaggagcaggcggggtagctacaattgcaatgggaagaacagcaagacataagtttttcctccttcaaagatatctttgtgccgggcgggccttgttttccgccctaccataagatatgtggaggtatagttttgggtgatatggaatagggatattttttaggatattttaaagaccggcagggtattaaaatcccccagctttgatttcgcggggggatataccagctttatatctaagttctagtgttctttttcgcggcagttagggcaatacccgtagagcaggagctggtgctcggtaatatcaaagccggtatccttagccaaattcttcgtcacttcatgcagcgggcactcgtttagcgttaggcgcttattgcactttaagcagaccagataatggtggtgggcctgggttgccttgcggtaacgggccgcgccgtcagcctccggctcgcgcaccgcgagcccgcgggtacaaagccgatccagcgtgcggtaaacggtggtcagcgccaatttggggtgctgcgcgcgcacgctttcgtatacatctgccgcggtcagggggacgctggcctgcatcaggcacgcatagatcgcatcgcccgtggcggtccggcggaaatttgccatgcctaaaacccctttcatccttcagattatcactattatccatcaatttagctgaaaaatcaatcgaattggggcgtaaggcttgcaagagcagggatcaaacggttatactcttactgcaagcaatttgcaataaagcggcggggaagggatagcttgaaaaaaatgacggtggtgctgctggcgctggtgctggcactggttcctttaggcggctgcacttccactggaggagacgttgctcaggcgcggctccaggtggtagcctccttttaccccatggcgcttttgaccgagcgggtgacagagggggtgcccggggtcactttacataccatggcgcagatgcataccggttgcctgcacgattatcagctacagccccgggatatgaagatattggaaaatgcggatgtgctggtgtacaacggcgcggggatggaggggtttattagccgggttgcctcgcttgagcctgggcttacgctgatagaggccagcgaagggcaggagctgctggaaagcgccgcgcacgaacatgagcatgaagacgaacatgaggcgcacgaggaacattaccatggcgatgccaacgcgcacctttggctctcccccaagcgcgctatggcgcaggtagagaatatccgggatgggctgatggcggccgacccggaatacacccaagtttaccgggaaaacgcccagacctttttgcaggagttggagcagctggacgggcaggtcgcaaccctgctggccccctgccaggggcagggcgtggtgaccttccacgaggggtttacctatctcttagaggattatggcctgcaccaagcgggacttttacagaccgatgacgagaatgcgcccagcccccgctatatggcggagctgatcgatcatatccgccaggagggcattgccgccctgttttgcgaaaagcagtattctacccgtctggccgaggctatctctcgggaaacgggcgcgaagatatacaccctggatactattgtttccggcccgggtgggcgggatgcatatgccaatgccgtgctgcaaaatgcgcagaccataagtgaggctttgaaaaaatgaaccataatcatcaacaggggctgtgtgagatcaagatcaaggagcttagcgtgaaaaagggcggccggcagctgctctcaggtatatcctttgcgctggactgcgggcagctcaccgcgctgatcggccccaatggcgcgggcaagaccacgctgttgcgcgcgctgttgggggatctgccttatcgtggcaagatcgattacgtgcgctacgacgggcgccccggccgggcgcagatcgggtatgtgccgcagctgctggaatttgaccgcagcgcgccggtcagcgtgctggattttctggccgcgggctacacgggttttccggtgtttctgggcgtgccgcaaaaggtgcgcgcccaggtggagcaggcactcggacaggtgggctgcccccaggccatcgaccggcggatgggggaactgtccggcggagagctgcagcgggtactgctggctatggcactcaatccgcttccggacctgctggcgctggacgagcccttttccggcatcgaccagagaggattaaaggatttttatgccctggtggcgcatctgcgggacagctaccacatgtccatcgtgctggtatcccacgatctgcaatgggtgcgggagcaggcggatcaggtggtattgctggagggcggccgggtagcggcggcgggcgcgccggaggcggtatttggcacaccggccttccgccaggcctttggagagggggagtagggatggaatggatcacgcagctcttcccggcgcttcggtacggctttatgcaaaacgccctgctggcagtggtgatgatcgctccggtaatggggttactggggaccatggcggtcaacagccgcatggcctttttctcggatgcgctgggccacagcgcgctgaccggcattgccctgggcgtggcgctgggcatcgatcagccggtgatctgcatgctggcctttgggctgtttttagcgctggtgatcacgcgcatcaaaaacgccaatacccaaagcgccgataccatcatcgccgtctgctcggccggcgccatggcgctgggactggccatcctctcccggggagggggctttgccaaatactctcagatcctggtaggggatatcctcagcgtgtcccccagcgatctgctctcgctgctggtagtgctggtggcggtggtggggctgtggctctacctctctaacgcattgatgctgatctcggtaaaccggccgctggccgccagccggggcatccccgcggcggtatacgagtacgtgttcgtaggcgttgtggcggtggcggtcatgctggccatccagtggatcggtattttgctgatcaacgcgctgctcattttgcccgcggcggcggcgcgtaatattgcccgcaatatgcgccagtaccacctgctctcggtgggcattgcgctgctgtgctgcgtaggcgggttgtttatagcttttgaaatggacatcgcggcgggcgccgccatcgtgatgctctgcgccctctgctttgcggccacctaccttgtgcgcggccggttgggcggccggtaaggaggggcgtatggcaaactgtaacctttgcccgcgcaactgcaatgcgccgcgcggagagaaagcggggacgggcttttgcggtatgggcacattgccggtgctggcccgcgctgctctgcatttttgggaggagccctttatctccggtacccgggggtcgggcacggtgtttttctccgggtgcgcgctgggctgcgtcttttgtcaaaacgatgtgatcagccgccagcgctttggccgggcgcttacggcgcagcagctggcagggatttttaaaaacctagaggagcagggcgcgcacaacatcaatctggtcaaccccacgcactttgtgccggccatcgtgcaggcgcttaaatactaccggccacatatccccatcgtgtacaacagcggagggtacgaaaaacgttccaccctgcgggcgctgcggggcttggtggatatctacctgccggattttaagtatatttcgcccgaaaccgccgctcgctacaccggcgcgccggattattttgcagtagccgcagaggcgatagaggagatggcccttcagaccgggccgctgcagctggacgaggacgggctgctgcaaaggggcctggtggtgcgccacctggtgctgcccggccatgtgaaggagagccgcgcgatcctgcgctatttaaaggaagccctgccgcccgggtgcgccgtttccctgatggggcagtacgtgccctgcggccgggcgcgccagttcccggagatcgaccggcccttgaccgcgcgggagtacgaccgggcggtgcagacctttatggagctggattttgaccatggctttgtacaggaaaggggcgcggccagcaaggcctttattccgaactttgccctgcaaggcctgccggagcaaggataaaacaaccgcctgccggtttaaccggcaggcggttttgcttatgcaatccatatactaaagaggtaagagacgctggcaaaacggtatttcatccgcgtttggaccaatccgctgccattgcggatgggggaattctcttgacaactgtcgggctgtgcctgcgcaggatagaaccgggcaaagcggtcgccatgagattcctcgctgacgcttcggaatgaccgcattggaaattctaacctgcgcgtttaagtatgctttattgagcgcccattgctcctgtcattcagagcgcaggcgaagccggcgcgaagaatccggaggcggcgcacacttgccctgcctgccccaggctgcactgagatcggctaagcccggcggtcaaaaaaagcccgctcttgttgggcacgcaatggcaggcactgcgaaaggatgcgcatcaaaataggcctccttgcataaccccttccgcccatcagccccggggccgccatgttgcgcacgcttattcaccctcaaacagatcccgctgcaggctggccataaaacccgccaccagcgcgtttttctcctgccaaaaacgctggccgctccgggtgcgcatggggttttggctgtgcaaaggcagggtgtatttttgcagatggcgccaggtggcctcaaagctctgcgcctcccggggccgggcgccctcggccatacaatcccacaggatggacagcgccccggtctcatccagcgcgtccgcatccatcagcacctgctggtccagggtaagggcatttgggggcagctttttatcggaatgccgggcgatcaaaaaacagaccttggcggtaaagactgggtcaaatcccgctgcatccagatacgcccggcagatgcgggcgctgtggatgggatgggtattgaccggatcgggaaaggcatagcccgcgtcgtggaaaatgacggcgcagcgcaccgcctccccgtcggccttttcctcccgcagcagccgctgcgcccagtgaaagacccgctgggtgtgcgcataccggtcgcgaaaggcgaaatctacccggttgccgcctaagggaatggccttgtgcccttccagaatgcggcgcacgtgctcccacatgcgcgccatctccgcctcgctcagcgccatggcccgcctccttatcctccgggcgcacagggaacgggcccggctttgccctgattttacggcgaaagcgggaggattgcaagccctattgccggtacccctgcaaaaagtctccgattttttcaaccccttggcgcagcacatcgcattcgggcaggtagacgatgcggaagtgatcggcatccgaccagttaaagccgctgcccgctacgatcagcacccgcttttcccgtagcagatccagggcgaagcgctcgtcatcctgaatgttaaagcggccgtccagccggggaaagatgtaaaaggctgcccggggctgcaccacgctcacccccgggatggcgcgcagcgcctcgaccacgcaggcgcgctgctcataaatccggccgtcgggcagcaggttcgggtcgggctgatcggggttggagagggccgtttccaccatatactgggcgggcacccccgcgcacagccgcatggaggagagcaggttcaacccttcgatatagccgcccacccccgaacggtccccgcttaagcacatccatccacagcggaagcccgccacccggtgggatttgctaagcccgccaaaggtgacgcaaaaaacttccggcgccagcgccgcgatggaggtgtgcttaaggccgtccatcaccaaccggtcgtatatttcgtcgctaaagaggatcagccccttctcccgggcaatggcggcgatatcctgcagtaacccggaagggtagagcgcgccggtagggttgttggggttgatcagcacgatgcccttggtgcgcggggtgatcttgcggcggatatcctgggtatccggcagccaaccggaagcctcgtcgcaaagatagtgcaccgcgcggcccccggccagggtagccgcagccgtccacagggggtagtccggcgcggggataaggatctcgtcgccgctgtccagcagcgcctgcatactcatcaggatcagttcgctcacgccattgccgatatacacatcctccatcgtcacgcccgcaatgcccttgtgcttgcagtaaccggccacggccgcgcgggcggcgggcaggcccttggaatcggtatagccctggcccaggcgcagcccctcctgcatagcctgcaggatatcgggcgggcagctaaagccaaaaggggcggggttaccgatgttgagcttgagcacctgctgtcccgcctgctccatacgggcggcctcctgggtcacgggcccccttatctcataacatacgttgttcagtttttgggatttatcgtaggttcgcatgtggtatagcctcctttttccattaaaaaagccctaaaccggaaaactccggcttagggcgaatgcgcttatagcgccatccgtgttaccacctaaattcggggggaagcgtacctctccccgcgctctgctgcggtaccaacataccgcaccccttgtaacggcggggccccggcagggctttagggcttttaaacccgttgggccttgcagctccagaatggcttccatgcgccgcggggaagattttcaccaagtctcttctctcttttacctgcgcggggaacatgtacttttttccttcatcgctttatttcatccattctagcacctgagccgggctttgtcaaacctatcggcacaaaaggcgggttatagccccagccgctggaacggttatgggcagtgctcagatcatgagatctgaaagatgtccaatgcaattataacaaagaaacgccgtcctgataacaggcgcgagcaaaatggccggtacagcattttgccgtaccggccagaacggcctataggcgtatgggcttatcccaacaggaaccgggcgatcaactcatgcccgatggagggctcaggacacagggcagctgcctgcgcctcagtatagcgccggtccgcatgctgctggggatggctgctgtcgtacagcaggtaggggatggggtcgtgcacgtgggtgcgcagggtcagcggggtggcatggtcgggcagcaccagcagccggtaatcctcgcctatatccgccaatcctttgagcaggggctttaatacccgctgatccagcctgtggatggcttccaccttatcggcggcgatgccgctgtgtccgcactcatccggcgcttccaggtgcaggaacacaaaatcgtccccttctttaaggcagcgaagggcggcctgtaccttgccctcgtagttggtctccagctctccggtggccccctctacatggatggggcgcagccccgcgcagatgccgatgccgtgcagcagaggcacggcggataccacgctgccctttaagtggaatttttcgtaaaagggcgtcaggctgggcttgcgcccctcgccccacagccagatgctattggcggtctccaatcccttggccttgcgcgccaggttgaccgggtggttctccaaaaacgccgcgctctttttcataaaatgcagcaactgctcgctcagcggcccccggggcaggtgcgcggcgatcttttcgcccaaaatgtcatggggcggggtagtctttagcccttcgatcttatagggcatctcgcctgtatccatcaccagcacgtggcggtaagtggcgcccaccgccatgcgcacgggctcgtcggcaaaatgggccatcagatccttcatgatcgcttcggcttcctgttgagagatcatccccgcgctgtgggagaccatggtgcgcgcctcatacgccggctcatcggtaacatgcaccaggttgcagcggaacaccaggtcgcgatcgcccatctccacacccatgctgaccgcttcaaggggcgagcggccggtgtaatgggccgccgggtcatagcccataagcgaaaggttggccgtatcgctgccggcgggcaaggcgccggggatagtgcgggtctgccccatctccgcgcgcaggcacagcgcgtccatctcgggcttagcggccacctccagcggggtttttccatttagatcggggcaagggcggtcgctcatcccatcgcccactaagataatatatttcatcaaggcgtcctcctttattttggctcatcctcccctattttagccccagcagaggccgttggcaagggtaaaccgcgcccggattggcaaggtggcggacggcgtggtatgatgggggacgaaagggtgaatgtgagatatggaaaaaacctggcagctcgcgctgctcaattggtatcgggaaaataagcgggacttgccctggcgcaaaaccagggatccttatgccatctgggtctcggagatcatgctccagcagacgcgggtggatacggtcatcccgtattacgagcggtttttggccctgtttcccgacatgaaggcgctggccagcgcgccgattgagaaagtgtataaggcctgggaagggctgggctattattcccgcgcgcgcaacctgcaaaggggcgcgcaaaccgtgctggagcggtttgacggcgctatgcccagggaggccgcgcttttgcaaaagatccccggcattggcgaatacaccgccggggccatcagctccatcgcctttgaccagcccgcctgcgcggtggatggcaacgtgatgcgggtgggggcgcggctgtatgcagatggacaggacattgccctgcccgccaccaagaaatactggcagaaagaagcgcttggctggataccgcaagggcaggcgggggattttaaccaggccctgatggaactgggcgcgctggtctgcttgccccggggggccaagtgcgccgcctgcccggtgaaggagtggtgccgggcctttgaaaccggtcaggttgaggcgctgccggtgaaatccgccaaggccaagcccgaggtggaacgctacctagtgctggcgctggtggatgaaaaggaacgggtgctgttttgccgccgccctgagggcgggctgttaggcgggctttggctgctgcccatgttgacgcagagggaggatgtggaaagctatatcgcaagcctgggccttacggcgttagagcgtctgcctctaggcaaggcacggcacgtgtttacccacctggtttgggagatggagggggagctgatctacgtgcgcgggggcggcaacctgccccagggcggggcctgggttgaaaagggaggctggcaggcgctggccctgcccggcgcacaggccaagctggtgcgtgcgctggaggaggcgctatgctgatggagaaaaaattggttttggtggcgctcaatgccaaatacgtgcataccagcttggcggtgcgcgctttgcgcgctgcctgcaagggtacccactggcaggtggagatcatcgagcgcagcataggcgatccgctggacgcggtagccgagcagatcgtgcgcgccggcgcacagatcgtaggcttttcctgtacgatctggaatatagagctgatccgccgcctgtgcgccctgctgcgcgccgcgggctgtctagccttttttctgttgggcgggccggaggtctcctttgagggggacgcggtctttacgcgcattccggaggcggacgcggtgatctgtggcgagggcgaagtggcactgcgcgcattgctgcaaagctatcctgcccttacccgggatattcccggactgtgcctgccgggatggggatacgtgccgcccgtacaggtggaggaacttgaccaattacccttcccttatgaggacggggaggggatagagccggggcggatcttatactatgaggcctcccggggctgccccttccactgtggttactgcctttcgggggaaacgcagctgcgccagctgccgctgccccgggtcaaggcagagctgcgagagttgatggtggcgggggtacggcaggtaaagtttgtggaccgcacctttaacgcgagcccgggacgcgcacgggagctgttgcgctacctcatggcgttggaccgggaaatgatgggcagcaccaatttccactttgagatcggtggccagctgctggatgaggaaacgctggacctgctggaggaggcgcgcaaagggcttttccagttcgagatcggcgtgcagtccaccgaccgtgcggcgctggatgcggtgggccgtaaggacgattttctaaagatcacccgggcggtgcaaaggctgcgccgcgcagggcacatccacctgcacctggacttgatcgccgggctgccgggggaaggatacgcgcgctttgcggcctcctttaacgacgtatacgccctgacgccggacatgctccagctgggctttttaaagctgctgcggggcagccgcctgcgccgggaagaaaaactgcatggctatgcttacgacccgtacccgccttacgagatcaccgccagccggaatatcacttatcttgaactgcggcgcttaaaagctgcggaggaggcgctggagcgctattataacgcccacctgtgcgaccgggcgctggcctacctgatctcggtgctggagggggacgcctttggcctgtatcagggcctgggagagtatgccggggagatcggcctgccctggcaggggcgcacgcccctgcagcgcatggagattttatatgcctatgcaaaggcgcatatccccggggcagatcttgccgccctttcagagctgctgcgctttgacctgctggaaaaggaaaagcggcgcggcctgccccaggcattggcgccgctggataccccggaaacgcgcaaaaaaatccgcgccctgtatgggggagcggtacaatccgcttatcccgcagcaggggagatggagtcctacgcgctgcggcgcaccacccatatcgagccgtttcggctggatatagcggcttttgaggattcaggggcgctgcagtggcgggcatgcttttggctatttcgttacgatggagcggcgccggtagaactgccgggttgatggatcagtcgttttcagggtcctcgtcccggcagcgtgtgcagctccagttgcacttggggtttttgcatacgcaggtctggtccacgttgtacaggtcggccccgcaaagcgggcaaaacgccggacagtctttatggcttgggttgttcatgtcctttccctccttaaaaatggccggatggggttgtcccttctggccttgaattttatatttttcaggcgtaaaggcgcttatctggcgccgataaagcgcaggatctcgcgctgtatcttttcccgctcgctggcaacatagtaagcgtgccaggaatcgttcagggtgacgcgccgcgtatgcgactgggaaagccgccggtcgataatcgcgccgcttttaaagcgtacggcctcgtcgtttttagagtggatcaccagcgtggggatcgtgatggccggcaggatctttttacttttggcgatcaaccgctcgatatccattacccggggcagataggtaagataacccggtaggctgggcggggttacgctgttggagcggtggtaagccatggctatggcattttgcgccgcatccttttgcgaggcggatttcaggccgttgaccgcgccgcgcgggctgagcttgatgcgcatgggcggggcgatggccactaccccggcgacctgttcctgccgggtgacggcggcttccaaggccaacaggccgccgatggagtgccctaccagataaacgcgtttatagcgccggcatatcttttctacctgcgcatccgtataggcttcccaggcgtccagccacgtgcgggcaaactgggtgctgctcccgccatgcccaggtagcagcagcgcgtaggcggcataacctttttgatatacggcctggcataaatcctcaaactgcaatgggctccccagaaatccgtggataaacaataccgccgcctcggcatcccgccggggtagaaggatctcccggtgctggaaagccccgctcttttctgtttccatattgggtccctctgttatttccatttaaacctattttaccacagacgggctacgctatccagccggcgtggaaaaggctgggaggtaaagcagataaggacggcgaagctggagaaggcgaacgtattgaagaatataaaacgggctttgccatttggaagtggcagtgcggagttttgtgcggaaaaatgttgcccatcacagacatgattggcgatagccgacgcagccgttgctgcggcttgcacctaacgaatatgaactgacataatggttcaaccgcgaaaagttggtcgcgaaagcgaaccgttgcgaaggcgtttacaaccgagcaggtgagatgagcgtgactttttgcggaaaaggagcgatgacggggcagcaaaaatcccacccgatttatcgaatgggatttttgccgcgaagtccatcgcgacgtggtagcggcagttggacttgaaccaacgacctatcgggtatgaaccgattgctctagccagctgagccatgccgccatatgggaaacgcgaatccatcgatccgcgcttcaaattggttgcgggggtgggatttgaacctcacgacctccgggttatgagcccgacgagctaccagactgctccaccccgcgacgtcaacgccggctttcaccggtgcagaaattagtatatccaatcttgtcctaaaagtcaactactttttatgatttttggttttaacttatcggaaccgggtaaaatgtatggaaaatttgacgaaagtgcccgcccgcgcaggagaaagggcggacggtatggaaatgcatagtgcagatatatgtggcttaaagggggataagacgatggaagtttccttgcgcgaggattatttggacgaggtgcagggccggggacggcgctatttccgcggatgggtgccggagggcgcgccccgcgccgttttgcagatcgcccacggcatggcggagcatagcgggcgctatgacgattttatgcgctttctggcggagcgtggcatcgcggccttttgtatggaccacgcggggcacggccgctcggcccggacgcaagcggagtatggcttttttggcgatgagggcggcatggcggccgccattggcgatatgcgccgcttcacgcaatggctgtccggggcctaccccaatatcccgctgatgctgatgggacattccatgggctcgtttatggtgcgccagtacctggcacaggatgcctcgacgctgagcggagcgatcctcatgggaacggggggcgtaaacaagcaggtgggcatggggatcatgctggctaagctggagcggctgcgcatcggccggatggggaggagcaagctgatcgacaagctggcttttggcggctttaacaagccctttgccccggcgcgcacgccttacgactggctgagccgggacgaggcgatggtagacgcctatattgccgacccggcctgcggctttgcctttaccgcccaggggtatttggacttattcgagctgaaccgcgccgtcaattccatcgaatgggcgcgcaagctgccgcccaggctgccgctgctgctggtcagcggagatcaggacccggtgggcggcatgggggaaggcgtgcggcaggtggcagattggttaaaagctaccggccatggccgggtcgcgctgaaactattcccaggcgcccggcacgaggtgctcaatgagaccaaccgccaggaagtttacgaggccatcgcctgctggttagaacgggtgctggcgccgtaaaacagggaaaaacgctgcaatagattgctgttgcagccgctgcaaaattgcgatctatggcgcacgcgggtcaaatggcaggttttatcccctcttagacgtgatttttttgggccgcgcgcgataacaggatagattgtggttggcctctacgcggcttgcctgaaatgcagaaaaggatcgtgaccgtgaaaaagaaaaagatacaaagccctacgcttccgatcgtgatcgtgttcggcctgtttatcctcattggggccgtcatgatctttttcggcctgcggggcacctggcagctggagcagactacccggagttatgctaagaccacgggctatttgaccgggtacatcctgcaagcggaggaacaatacgatgcggtgaaaaaggagcataccgcggcgacctattatctggtttacagctatgcggccggccaaggggagtaccaagtggtcacggattacgccaccagcatcctccctgcgatggggatcagcgcggatatccgttacgcgcccgatgacccggagcgggcggtgatcgtcggccccaataaaaacgccgggctgctgtttatcggcgggatgtttgccgtcattcctggcgtgatgttatgggtgatgttaaagccggtccccaagaaaaaagggcggaaaatagatacgacgggcctggtttttgggctggttttcgcaacgttcggctacggggcgctctatatggccacaggcgagtatacgctaagcggcatcgttcagttttatcaaacttcgtttatccttccgctggcgatcccgccgctgctgattgctgtaggcctgtttgtcagcatcaggagcctgctgggcgtttctgccgggcaaaagcgcagcaaggccaggcgcgggcagaaagcgcaaacgccccatcggtaaagatggggcgttttataatggatatcgggctgcttacagctccaccagcgtagcttcatgcccggtgtggggcaaaaacttttccagaatatcggccgtgcgtattttaaggctggcggtattcacgcatgggtggcagccgataaattcgtgggaaaccacctcccggtcgattagcaggcgcacgcgatgcccggtatcgttcatcaatcccaggatgctgaccgcgccgggagtgatattgagaaactgctgcatatactccggcgcggcaaaggacagacgggacgagccgatttgcttggacagatccttggtcttaaagggcttgctgcccggcatcatcaaaagatagaactgggtcttttgcgcgttgcacaaaaatagatttttgcaaatctcgatgcccagcagcgtgtcgatctcccggcaggcctcgatggagggcgtagggccgtgatccagccgggcaaagggaatgttcagcgcctccagcaaggcgtaaacggccatctcctttagcagccggccctccggcgcgggggcggtggtatataacgtagggtcactcacataggggttcatcgcgggttcactccatttctagaataagttaaacgacttggccgcaaatacaaaaaggaataccgtaacggtggatagcgcagaggagaacaccacctgctgaccggccagctcctcatccccgcccatctgttgggccatggtaaaggaattgactgccgtaggcgcgccaaacaccaccatcaggctggccagctccggcccgcggaagcccagccacaccgccaaagataaaaagatgagcgggcttattaccagcttgccgattacgcagatggtcagctgccgggcattgcgccccaccttggaaaactcgaaaaacgcgcccagcataaaaagcgcaagaggagaggcgatctgcgccaggttgccgatggaggtggtgataaagggggccagcggcagcttggtctttaaaaggatgatgccgatgatagagccgatgatcagcggattggtgatgatgtttttaaggatcttgcccacatcggtctttccgccccggtagacctccagcgcgatgaccgagagcacattgtaaagcggaatcgtgatagccaccaacaacgaggcgatactggtatccgcccctgggaaaatggactgcaccagcgggatgccaaacagcgcatagttactccggccgatggcctgtatcatcaccccgcgcttggtattgtccttttcgatcagcgggatgatcaaaaacagcagcaggtaaagtgccaccacgcccaccccggcaaagatgaaaacgccgccgctgatgttgccctcggtgctgtccatgatgtttttgcacagcaaaaccggcaaaaacaggcgaaagaccaggttgttcatcacccggatggtcttgtcgtccagcatcttcagccgccgcgcgagataccccacggccatcagcacgaacaggggcaggatgatgttgagggataagatcaggttatccataaatagcgcctctccaatacggtcgattttggattttgagaaccggcctgttgcgccaaaaggcgcgcaggcttacatcaaagcccattttacgccatttcaccccgctgtgcaagaaacaaaagtaaaaattgcaaaatgctggcgattgacggggaagccgggatgccgtacaatgtctttaaataaggtaatgcgccggtttttggcgcagggagggcaaccatggcaacgcgtatcgcgctgatcggcatcatcgtggaggatatggacgctaccgagcagctcaacggcattttgcacgcctatagtccgtatatcatcggacggatgggcattccctaccggcaaaagggcgtcagcatcatttctgtagcggtggatgcggaaaatgacgtgatcagctccctttccggcaagctggggcaggtcaaaggcctgagtgtaaagaccatctattctaaagcccagggcgcgcaccgggaggatgaaagatgaaagcttatttatttgacctggatgggaccgttggcgagacgctgccgctgtgtatcgccgcctttcaggcggcgatcgagccgctggtggggcgcaaggtcagcgccggggaaattgcagggacctttggcccctccgaggaggggacgatcatggcgctggttccccagcattttgacgaggggttgagcgcctacgtatcgcattacacccgcctgcacccggagatgtgcccacgcccctttgaggggatcccccagctgatcggccagctgcgcggggcgggcaagatcgtcgccatggtgacgggcaaggggccgctctcgggcgtagtcaccttccgccagttcggcttggaaaacgcctttgatgaggtggtgtacggcatcccggaggggcccagcaagccccagggcattgcacgggtactggagcgctttgccttggcgccgcaggacgccgtctatatcggcgatatgccaggggacgtgaccattgcccatgcgcaggggcttaaagcctacgcagcggcctgggccgactcggcagacctgcaggcactaaaagccgcagggccggaggcgctgtttaccagcgtggcggactgtgcccgctatatcgcgctgcaggagggccttaaggcctaagcaataggaggacgcgcatcgcgtccttttttacagccaaagcttgacttttcaaagatttgccagcgcccgggcggcagaagagtctgcaaaaaacgtagaaaaaggaagatcaggcgtagaaagggaggagggtaaagatggatgcggcagcccgtatgtttttatatttgattctctatagcgtggtgggctgggtgtatgaatccaccctgtgctccattacccagcgccgcctggtcaaccgcggctttttaaacggtccgctctgccctatttacggcttcggggcggtggcggtcattctgctgctgcccagcgggcaggatgagagcctgatcaagttgttcttatccagcagcgtgctttgctgcatattggaatactttacctcctacctattggagaagctgttccacgcccgctggtgggattattcaaagcggcacttcaaccttaacggccgcgtgtgcctggagggcgcggtggtttttggcgcaatggcggtgctgctggtacggtatctgcacccctttgtagccgcgcaggtggccaaactgccgcgcgcctggctatatgggatggatgtgggcatctttgccattttgatagtggacttgacttttaccgtgcgccacctgctggggttaaagggtcgcctggcggagatacaaaagctgctgcaggcccaaaaagaggctggacagcgcaggctggaggcactgggggaggggctgcgggacagccttgccgcccgggaggagagcgcccggggctatgccgagcggcttagcgcattgctgggcagccggcgctttcaggaccggcgcctgatgcgggcctttcccgggctgaaattccgggacagtgaggcctgggagcagcttaaagagcgcttgcgccgcaaaaagcagccgtaataataatttttagtgagctaatgactttgcatttaatcggaatatgtcctataatgtagaagatattttgctagctactgcgcaagttcgggggtacagatccctagcgcatgcaataaggggaatcgatagattttgatggaatacaaattagggatcgacatcggctccaccacccttaagctggtggtgctggatgaacgcaacaagatcgtttataaaagttatgagcgccacttttcccaggtgcgcacgcttttggccaaaaggatgggcgaacttaaaaaactgctggagggtaagcccctgcaggtagcgctggctggctctgcggcccttggagtatccgaggagaccgggctgccctttgtgcaggaggtatttgccgccacccaggcggtacgtgcgctttacccaaaggtcaataccgtcatcgaactgggcggcgaggatgccaagatcatctttttgaagggcgcgcctgaggagcggatgaactccacctgcgccggcggtacgggctcctttatcgatcagatggcggcgctgctgggggtggagctagacgagctggatgcgctcagcctgaaagcggagagcatttaccccattgcctcccgctgcggggtatttgccaagacggatatccagcctttgatcaacgacggcgcgcgcaaagaggacctggcggccagcatttttcaagccgtggtcaaccagacgatatccggcttagcgcagggccgccccatcgagccgccggtgctgttcttaggcggcccgctcagctttttaaagggattaggggcgctgttttgcaaaacgttaaaacttaaaacgaatgaggccatcttcccggatacggcccgatattttgtggcgctgggcgcggcgatctacgcaggcggcgccggacaggcgatggattatggagagctgatgggccatctggacaccgccagccggccggcaaggcgcttggaggggctggaaccgctttttgccagcgagcgggaatatgcggcatttgccgcccggcatgagcgcgcggacgctccgcacgggaagcttgagggcttctgcggcgtgggctacctggggatcgacgccggcagcaccaccaccaagttggcgctgatcgacggggagggccgcatcctctacagccactactgccgcaacgagggcgacccgctgggcgtagtgatcgagcagatgaaaaagatttacgccacggccggtaaagagatgcgcctggcgggcgcggccgtcaccggttatggcgagcagtttatcggcggcgcgctgcggtgcgatgcgggcgtggtcgaaacggtggcccattatacggcggcccggtacttcaaccccaaggtcagcttcgttatcgatatcggcgggcaggacatgaagtgtttccgcatccgcgaaggggcggtggacgacgtgctgctcaacgaggcgtgctcctccggttgcggctcgtttttagagacctttgccagttccatgggctatgctatcggcgattttgctaaagaggggctttttgcttcccagccggtgaacctgggcacccgctgcaccgtatttatgaattcctccgtcaagcaggcgcaaaaagagggcgcctcggttgcggatatttcggcggggctgtccatcagcatcgtcaaaaacgcgctgtataaggtcattaaggtacatgatgcagcggagcttggggacgctatcgtcgtgcagggcggcacgtttttgaatgattctgtcctgcgcgcctttgaaaaggaactgggccgggacgtggtgcgcccccgcatcgcggggctgatgggggcctttggcgcggcgctgtacgcccgctcgctgggcagggagcaaagcgatattctcacggcgcaggagcttgagacctttacccatacggccaaaccgctgacctgccagggttgtgccaaccattgcaggctgacggtcaacaccttcccgggcggacgaaaatatatcgccggtaaccggtgtgagcggcccgtgacgggagaaaagggcggaggactgcccaacctgttccgctataaatacgagaagatattggcactggcccaggcaccctcttccggtaacggacccaggatcggcctgccgctggggctgaatttttacgagacactctatttctggaaacccttttttgagagcctgggctgccaggtcctggtctcggggccgtcggcgcggaatatctattacaaggggtaccagactatcccttcggatacggtatgttatccggccaagctgatgcacggccatgtgcaggatctgatcgacaggggtgctgaggtgatcttttacccctgcatgacctataattttgaagagggcatgggggataactgctataactgcccggtagtggcctactatcccgaggtgatcgccggcaatatgaacctggcggggcggcagtttttgatgccctatatcagcttgaacgaccgggactttttcatccgtcggatggaagaggagcttgcggcgtttggctttggccaaaaggccatcgccgcggcggccgatgcggggtacgcctcccagcgggcctatcgggaggcgctttttgccaggggcgatgctgcgctgcaaaaggcccgagagaccgggagtaaggtgctaatcctagcgggacggccttaccatatcgacccgctgatcaaccacggtatcgaattgctgatgagttcgctgggctttaccgtggtttcggaggacagcatccgtccgctggaggacaaggcgcgtctggacgtgctcaaccagtggacctaccacgcccggatgtacaatgcggccagggcctgctgccagatggaggatacggcgctggtgcagctggtctccttcggctgtggcatcgatgccataaccaccgatgaggtcaaggccattttgagccgggggaaccgcctttacacccaactaaagatcgatgagatcaataaccttggcgccgtcaagatcaggctgcgcagcctgcttgcggcgatggaagaaagagagaagcaaaaacgatgaaccatgaaccggtcgcccgggtggagtttacccgggagatgaaaaaagattatacgattttggtgcccaatatgctgcccatccactttgagatgatctgcgagattttgcgccaggaagggtacaagatcgaactgctcaccaccagccacagcgctatcgtggaggaagggcttaaatacgtacataacgatacctgctatccggcgttgctggtcatcggccagatgatcgacgcgcttaagagtggcaagtacgatgtagatcatacggcgctgctgatcagccagacggggggagggtgccgagccagcaattatctgagcctgctgcgcaaggccctgcaaaacgcgggttttccccaggtgccggccatctccatcaactttaagagcgagctggagagcaacagcgggtttaaacttagcctgcttgccctggtcaaggccagctttgccatgatgtatggggatatgctgatgtggattgccaaccagtgccgcccctatgaggtgcaaaagggccagacccaggcactggtggaaaaatggacccgaaagttgaccgcgcagttccgctccccacggtgcttgatggtgcggcgcaactataagcgcatcttgcacgattttggccagattgcactgcaaaagcgggagcgggtgccggtgggcatcgtgggcgaaatctacatgaagtacgcctccctgggcaataacgccctggaggactttctggtttcccagggggccgagccggtgctaagcggcttgatggacttttgcctgtactgcactgccaatgcggccaacgaccataagctttatggcaatgcgggctttgtgcgccgtgcctccagcgccatcgcacgcttttatctggtgaaacggcaggatcagatgattcgcgccattcaaaaggatggacgcttcctggcgcccagccggtttgacgatgtggaaaaactggccgatgggatgatcggccatggcgccaaaatgggagaaggttggctgctgaccgccgaaatgatggagctgattcacagcggggtcaaaaatatcgtctgcacccagccctttggctgcctgcccaaccacatcgtggccaaggggatgatccgcaagatcaaggagcattatccggaggctaatatcgtggcggtggattacgaccccggcgccagccgtatcaatcaggagaaccgcctgaagctgatgctggccaacgcccgagagagctatatcgcccctgccgcgcagatagggctggacttgtcgccggatgcgaatctcgagagcgaacaggaaagacgcgccagcggcgatgtatcctaaaatatcatattgctagtacttttgcccgcgttctatgggacgcgggctcttttatattcccaaaaatgaaatacacctgcccatcaatacgcttttcggtgaacgaagagtcaagcctatatgttttcgtgagttattcgaaattaaataggctgattttccaaaaataatgaaagagaaacaaaaaaattgggaggggagccttgcgcattgaagcgaattttgtagttgtatgtgccaactcagatctattttactgattctatttttaaatcgactgtatgaagttttatattctctactgtgcatatcggatatattgggggcgaatttatgaagggcaggttttccaaactggagcgtttagctggggataggaggatgcaaaaggcttttgcggtactgatgggcctgctttttatttatccctttgctgaaactgccgcgcagggattgctggcacaggggcactggcccaaaatcacggccgaagtgctgctggcgctaggctgcggcgcggcctgtgggcggatcatgcggggtgagcgggtaaggcgtagcggcgttggtaggcactatctttgcggggctgatggtagggacactgacttatcagtacatttttataagtggcaaatttacagtatggcagacctggtttgccgctgcctgggtgctgggaatgacggccctgcccgcctgcggctttttattgaccgagcggccgctgccaagctctttgcggccggcgatactggggacagggctgggcgcttattttgcctgtgcgctgctctttggcctattatgcccggtgaaggaggtgcaggcgcggttaggtatcctgggcggcgcttatatcgttctggccattttggcgctgaaccgcctggccatcggccatgcggcgggagaaaacgctgccatcccccggtatattttgcgcgcggggcggctgatgctgattccattgctgatcctggggctggcggtgatgaccctgccgctgtggcaggaaggactttggcgcctgacggagctgatcggccaggggatcggagcggccatcggctttatacgctatctcatcgggctcacgttgcccgcggttgatgacgaaccgggagaggggctggaggtggagtttgagccgggcatggcgccggagtggctgattcgcctgttgcagatcatcagcggggttttatttgtggcagtagcctgtctggcggtgtatgggctttaccggctggtctacaggtggatcctgggccggaaagagaagaaggatcggcgccagtgggtggaggaaaccggatttaccgatgaggaagaggttctggatcgggaaccgcgccgacggcggcgccgcaggcggtatacagccgcaccccaaaagatatgggaagactgccaggatgatgcgcagcggctgcgcctggcctatggacatgtcaaaaggcggctggcaaaggacccggcccagggatatctggcagccgccatgcccagcgaggtagcgcgcaaggcccggatagaacaggtaacaaaggaggagcttgacctactggcacagggctacaacctggcgcgctacagcccgcatgcagccgggcgggctcaggtagaagcggcacagcggatttataagcgtctataggccggcttagagggcgtaaatatcaaaaatgtggggcttaacctaaaatatggggggttgattagcggacgaaataaactaagcttatgatatacagctcgtaaacccggcccgccgcaaggcagggccttttacaaaaaaaggcgcgcaggcgcgaagataagggggaaccgatgatggagttgcagcaattaatggcgttaccgggaaaattgatcgagaatatcagcaaggtcatcgtggggaaggacgatgtgatcgaaaaggtcgtggtggcggtgctggccggcggacacgtactgctggaggatgtgccgggcacgggcaagacgctgttggcccgcagcctggccaagagcctggcggccggcttttcgcgggtgcagtttacgcccgaccttttgcctgcggatattaccggggccagcatttttaaccaaaaggagaacgtatttgagtttaagcgcgggccggtctttacccatattctgctggccgatgagatcaaccgcgccacgccgcgcagccaatcggccctgctggaggccatggaggagcatcaggtcacctcagacggggagacctataagctggaggagccctttttcgtcatcgctacgcaaaacccggtggagacccagggcaccttcccgctgcccgaggcccagctggaccgctttttggtgcgcctgtccatgggctacccttccgatgaggacagcctggagatattgaatcgctttaagggagccgatcctctgggcgcgctgcaaagcgtggctaccgcccaggagctttacgatgcccagtgcagcttccaccaggtctatgcatccaagcccgttgcgcagtatatgatcgagatcgtcacccgaacccgtagctttgaaggggtatctctgggggtcagcccccgtgggctgcaggcgctgatgcgtacctgccaggtgttggcgctggcccgggggcgggactatgtgctgcccgatgacgtcaaggagatggccctgccagtgctgggccaccgcattatgatgcgccggggcattttagggcaaaaagagggcgctgccggcgtgatcgccaaaatactggaagcggtgcccgcccccacggaggatctggagcaggaggcctgaaatgagcgtagtttggctgttggtagccatcggcgtgctgtgcctggcgcaggcctggctgtttgcgctggccggcccgcttaagatcggctataaaaggacattttcaacctcggaggcgtacgagggcgaggagatcgagctggtggaggtgatctccaacgccaagctactgcccctgccctggctgcgggttgaatcctacatttctcaaaatctgcagttccacggccagagcgacctaacggtcagcggcgggcggtatcaccgcagtttgtttttcctgccgggttaccggcgcatcacccgccggcacaaggtcaaatgcctgaagcggggctattataagctggaatcggtcaacctgtcggtgggcgacctagtgggcattaagcacgccagcggcagccgggcggtacaggcggaggtaacggtctatccccggctgttcgatatcggggagatgcccaccgaatccctgcgctggcagggggacgttgtggtgcgccgctatatccagagcgacccttatctggtcaacggcatccgggattacgcggcgggagaccggcaaaaggatatccattgggccgccacggcccggcgggggcatttacaggtcaagacccatgatttcaccgcctcaccgcgggtgatgatggtggtcaacgtccagcgggacgccggccagtggggagaactgggcgaacaggaggccgaggtgatcgagcggggcatctcctacgcggccagtttggcagcttgggccgtatcccttgggctagaggcggggatgaccaccaacggcgatatcgacggtctgcaggagcctttgtatatcgaaccggccggcggtaacgaccagctgcgcagcatattgggcgcgctggcccatctgcggatacaccgcaagctgaccctgcccacgctgctcgagcaggtggaggccatgctgccaggcgggatggactttgcggtgatctccaattattgggacgaaacgctggaaatgcatgccgaccgcctgcgggcgctgggcaatacggtaacgtatctgcccgttccgcagggcgaaaaggaaagtgcggcgtcttagggcgaaaatcgtggtgcagcttgggggcggaaaaatgaaaatagactttagggctttatgcgcgcgcaagggcgtcaggagggccatgcagatcgggatggggattctgatgctctacccggtgtgcgaggcggcgttgcagggcttcctggcagggggcacttgtatcccgggtacggcgatgctgctgggcctattgctgttgggcgtgctggccggtctagggacgcgtaaagccaagacaggtgttgcggtattggtgctgctggcgctgttggcgggcagcttccttgtggcctttttcccgtggatgggtgtacagttacagaccgtttggatggtggccgcgcccgtagcggctgccgccggctttttcgtggcgcgcatggatatcccctcgacgctggacgtgcggctgctgccggtggggtttgggctttacctggttgtggcgctggtattcgggtggcttttccccatgccgggcgcgggagagcggctgggcgcctttggctcggtctatgtagtcatcgccgttttaatgattaatgccacctccgtgcgagaggcgggggccggtaacgcgccccgttcggtacggcggggcgggcggatgatggtcgttcccgtcattattttggcgctgttgatgatgaacggtccgctggtgggccgcggcttgcagggctttttgtggatgatcgcccaggtggtaggtttttttgtggccgggttgggatggatcatgagcctgtttgcccagaataccccggaaggattgacgcccgccacgccggaaagcctggaattggagcctacggtagaaacgccccagtggttgcaaatcgtcatgtggatggtagccgcgctgatcgtggcgtttatcctctttatggcggtgcgctgggtgatccgggcgctaaagcggttgatggagcgcaccgcgcccagcggacggtattcccagggcgagggttacgtggacgaggaagaggatatcgtccagaccaaaaggcggggttggctttcgcgcatgctgcgccgaatgcgccgcaagggttggaaggactgcgcggacgataccgagcgggtgcgcctggcctaccgcagggtgctggatcatttggaggagcaggaagcgcaaaatccgcttacgctgctaacccccaatgaactggccgggcaggcgcagctgcggcgcgtgcctaaaggtacgttgcaggcgctggcacagggttacaacctggcccgctacagccgccgtgcgccggataaagagcacgtggaggcggcgcgcaaggtctatgggcagctgtaaggagaacggcggcgggtttgtaaaatcatggtgggggagcgcagagtctatcgccccgtagcaaaaactcccttacgctatcattcagagcgaggtcacgaagccaagcgaaaaatcccgtgcgtgggcagttagacgcgcttgtgctgaaagatgggcaagctgcgcccggtggaagcggcagcatagcgctagaggagcagccccaacctagtggttgccgggagattcctcgcctatggctcggaatgacagagcaggggcattgagaatgtggagtaaatcgcggtgtatactttatccctcacccttacgccgtcatttagagcgtaagggttattagccccagagcgaagaatctcatgcgtgggcagttagacgcgcttgtgctgggagatgggtaagctgcgcccggtggaagcggcagcatagcgctagaggagcagccccaacctagtggttgccgggagattgctcgcctacggctcggaatgacagagcggggggattgagaatgcggagtaaatcgcggtgtatgctttatccctcacccttccgctgtcattcggagtgaggccacaaggccgagagaagaatcccgtgcgtgggcagttagacgcgcttgtgctgaaagatgggcaagctgcgccggtgggagcggcagcacagcgctagaggtgcagtcccgacccaacggttgccgggagattgctcgcctacggctcggaatgacaacacaaaataaacgcgcaagcggcatgcaacccccaaagggtttgcagacgtggtataataatagggcatgacttaggtcatgctctgtcgtcattttaaaacagattactaaaggagtgccccgcttatggcgcaatggcccaaagaagttgaagaaacgctaaaaaatttacccgatcatcccggcgtctacctgatgcgggatgcgcaggataccattatttacgtgggcaaggccatctcgctcaagcgccgggtgcgccagtacttccaatccacccagaaacacggggccaaggtgcgggccatggtggccaagatcgcccgcatcgagtacatcctggccgatggggagctggaagcgctgattctggagtgcaacctcatcaagcgctaccggccccactacaacattctgctcaaggatgacaagcagtacccctatgtacgcattaatttaaaggagccttatccccgggtggagatcgcccggcggatcatggatgacggggcgcgctactttggcccctatatcggctcgcattcgctgcgggatgtactgaacaccctgaaaaagacctttcccatccgcacctgcaaaaaggctatcgcccctggcatgcgcccggatcggccctgcctgaactatcagatcggcgcctgcatggcgccctgcgcagggttggtcaccccggaggaataccgggaggtgatcgaccaggtgatcctgttcctctcgggtaagtatgaggatatcgtctccggcctgcaggaaaaaatggcggacgccgcccagaagatggagtacgagcgggcggcgatttatcgggaccggatcgccatgatcgatcgggtgatgcagcgccaaaaggccatttccaccggccttgaggaccgggacgtgctggccctggccgaggaagggccgctgggggtggtgcaggtcaccaacatccgcgcgggcaagatgatcggcagccagcactaccccgtaaacccaccgttggaggccggcccgggagagatattggcagactttatcacccagacttacggggaggatacctttatcccccgggagatcctggtggcctcgcccttgccatcgcccgaagtgtacgaacagtggctctccgaaaagcggggtagccgggtatatatcctatgcccccaacggggggagaaaaaaagactggtggagctgacacaggataacgcaaaggaacggctgcgccgcatactgcaaaaagagcaggtggagcaccagcgcaccatcggcgcgatggaagatctacaaaagatcctgcacctgcccaaagttccctggcggatcgaagggtatgataactccaatattcagggtaccaaccccgtatcggtcatggtggtggccgagggcggtaaggctaaacccaaggcctaccggcgcttcaaggtcaaaacggtagaaggccccaacgattatgaaaccatgcgcgaggtgctgacccggcgctttacccacggctttgccgagctgcaaaagcgcagggaagagggcattccggacgatgcgccggggggcaaattcttgccgctacccgacctggtcttgatcgatggcggcaagggccagctgggcatcgccctggaggtatgggaggaactgggattggatatccccgtgttgggcctggccgagcgatatgaagaggtgtttttacccggccgcagcgatccggtagtgctgccgcgcaactcgctggcgctgcaattgctccagcgcgtgcgggatgaggcccaccgctttggcatcacttttcaccgcagcctgagagctaaatccatggttcaatccgccctagagcagttgccacaggtgggcccggcccggcgcagggcgttgttcgcccattttggcacggtctcggccatggaaaaggccactttagaggagatctgcgccgtgccgggcatgaaccggccggcagcgcaggcactatacgcccacttccacggagagcaggcggaaaaggcaaacgaaacagaacagtgattacttggcggatggcccgccaccccttggcgcgggggcttccatagggtataataaataaggtttacgtaaagtagtgctacaacacagaggaggacgaacaacccatggctatcaaactcgtcgccatcgatattgacgatacgcttttaaattccaagcatgagattaccgaccgcacgcgggacgcgctgtacgctgcacaggataagggctgcacggtcatcctggtaaccgggcggatgtacgcggccgccaagcgctatgccaaggcgctgggactcaatacgccgcttatgacctgtcagggcgcgcagattaccgatattaagaccgatgaggtgctctacagtcgcacggtgcccctggaactggcccgggaggtggccgacctgtgcgaggcgcgcgggctgcatatccagtactatatcggagacaactattattatgccaaagagggcgagccagcggattactatgcggcgctggcgggttttcggggcatcccggtgggcagcccggtatctgaaaagatcacggaagagccggtgaaaatgctctgcctggatcagccggatgtgattttgcagcttcagcaggagatgatcgaccactttggcggcaaattggccatcgccatctccaaaccccgctttctggagttcacccaccccgaggccattaagggccgcacggtggccaattttgcaaaccagctgggcattgctcaggaggaagtaatggccatcggcgacagctttaacgatattaccatgatccagtacgcgggcaagggcgtggccatgggcaatgcggatgcgcgcatcaaggccgtggcggacgagattgcccccagcaacgacgaggacggcgtggccgtgatgatcgaaaaatacgtgctggcttaggatgcgcggataaagaaaggcgtgagggaaatgcataccatcaccgtagaggagttttgcaagggcatgggtttgagcgtggtcagcgcggacgaaggggccgagatgcagatcacttccagcgacatcaaccgcccaggacttgagatggcggggtactttgagtattttgccccggggcgggtgcaggtggtgggccgctcggagatcgcttacctgaccagccgctccaccgcccaccagatcaagtatatggagacctattttaataaggagtttccctgcctaatcgtctgccgggggctggatttgcccgaggacgtgctggcgctggccgtggcggccaaaaaaccggtgctctcctcccagcagtccaccacgcagctggtgcaccggctgatcggctacatcgataacctgatcgccccccgcggcaccatccacggggtgctgatggatatttacggcgtgggcatcctctttacaggggagagcggcatcggcaagagcgaaacggcgctggagctgattaagcgcggccaccgcctggtctccgacgatgcggtggagctgtgccgggtggcggataaccggctgaccggagaatctcccaagctgatccggtacctaatggagatgcggggcatcggcattatcgacgtgcgctccatgtacggcgtaggttcggtgatccggcaaaagagcattgacctggtcatcaagatggagcgctgggacgacgataaggtgtacgaccggctggggatcagcgaagagtacgaggagatgctgggcatcaagatcccgcgcatcaccgtgccggtggccccggggcgcaacctggccatcatcgccgaggtggcggcccgtaacttccgcttaaaggcccagggctataacgcagccaaggagctggaccggcgcatggagatgatgatgagcggccgggccgaagagctggacccggacgacgtgagcggtatgcatttctaaggagtatgatttttggcccccagggccgttgcaataagaaacggaggagtagttatgaaatatgtagggatcgatctgggcggcaccaacatcgtggccggcattgtggatgacgaggggaagatcctctgccaggtggagcggcccaccggcaatacccgcccctttgccgaggtagctaaagatatggccctggcggcggtagaggccattgaaaaagcgggattgacgccggcggacgtggagggcatcggcatcggcgtgcccggtgcgatcgatcacgtgaacggacgggcgaccgcggtcaatttgggttggcatatggagcccgtgcgcgatgaaatgcaaaaggtgatcaacctgcccatccatatggataacgacggcaatgccgcggccctgggcgagatcatggtcgggtccatgaagggcgccaaggatgcggtgtttatcaccttgggcactggcgttggcggcgggctgatggtaaacggtaaaatgctgcggggcgcccactccgtagccggggagatcggccacatgaacagcatgctctacggtggggtggattgcaactgcggccagcagggctgctgggaaaagtatacctccgccacggcgctgatcgcctttgcgcgggaggccatggagcagcaccccgactgcttgatcgcccagaagaccggcggggacaaggccaaggtcaacgccaaggtggtaattgacgcggccaaggaaggggacgcggtagccctaaagctgtttaacgactatgcctatgccctgggccggggcatcgcctcgctgatccacatcctggacccggaggtggtggcgctgggcggcggggtttcccgtgcaggggatttcctgctggacgcggtgcgcgagcaggtcaaaaagtgcgtcatgcatccggatatgccttatgcgcgcgtggaactggcgaccctgggcaatgaggccggcctgatcggcgcggccatgctgtgcgccgaggcggcggagaaatagcaacggttacgagcagacagccgggcgggagcgcccggctgtttttttataggggcgccgggtcttgactatgcccctggggcacggattatgatggggctaatgagatgacagatgggagggctggacgatgttgctcaaagaggcttgcgcccgtagcgggctgaccaaaaaagcggtgcattactacgagagccgggggttgctcgcgcccggagtgcagagtaacggctaccgggattattccgaggaggatgtagcgcgtctgcgggagatcgccaccctacggcgcctgggtgttggcgtggaacagatcggagagatcctcaaaagccaggacaaaggagtggcgctgcaaaagtatcgctatctggcagggctgaagatgaaacgactgcaaaccttgcaggattgcctttgcgacctggcggaagattacgatgtggaacagatcttcgaccggctggtacacctggagatggacgattataccctgcgcgaacggatggcgctggcctttccggggaattacgggctgtttttatccctgcacttcggccgctttttaaatgagccggtggatacgcccgaaaagcgcgcagcattccgcgcggtgatcggctacctggacgaggtggaactatacctgccgccagagctggaggaggggctgcgtcaggcgctggaggcacaggacgctaccgcgctgcaagcgcgtaaccaggcggcaatggaggatgtgctggaggatccacagagctaccttgaggcgcaggaggagcagatacgccagtacctggaattcaagaggtcggaagcttaccgcaattcgccagcgggcatgttggagcaaatgctgctggatttccaaaggcgcagcggttatcaggaggtactgctggaaaatctaaaggtgctcagctgtgcataccgggattatatggagcgcctgcaaagggccaatgcggccttttataagcggtttccagaggcacaaagcctgtaccaaaaatgatgttcaccccaaagggccgcggaaatggatgacgccgcggcccttttgctgcccgcccggcccggaagaacgggtgctaaacgccggtgggcacgcataaaaatagtcctgaagtcaggcgctgtctggccgtaaagggcgcgtaaacgggggtgtgtgggtgagaaagccggccttgaatctaaaaaagcggtggtttagcattaccgtatgtattttaacggcggcgctgctgctgcagctgcctggcctgttccgtcgggctgcccagccggcgccggtgcccgaatccctgcaaaacagccagagcggctggggtggggtgctgcggctgtgggagatccccagcgtgcgtaccggcaagggggattccactgcgtttttgcgcaaccgcatcgccgcctttgaaaaggccaaccccggggtgtttatcgatatccgggtgctttcggctacgcaggcacatacgctgctgcaaaaggcccaggcgggggaggggtatctgccggatatgatctcttacggcgcgggcttttttgacgacccgtccgcctggctgcaggaggcggaagaccccctgccggataacctgcacccttcgctgcttaccgccgcccggtacgagggcagcgtatacggcatcccctatctgttcagcggctatgccctgatcgcccgcagcgatgcgctttccagcgccggcgtcacgctggagccctgggatgccgccggttgggcgcaggcgctaatagcgctctcgggtgagaagccaaatcccgaccggccgcgggataagatccccatacgggggcttgaagccggctcaaagggcggcagcgccaattttgcgctggcggtagccgcgcgcgagggggagggcgtggcctgcccggcggagggtctgcacgaggagggccttgggggcggacaggataaagccatggaacgcctgctttccgggcagacggccatgatggccggtggacttggagagatgcagaccctgatcaaaaaggcggaggaggcggaaagccctatcgccctgagcagccagctgctgcgcgcgccagatggcagcatctttaccgaccagatgcagctgctggccctcatgaagggcggacaggatgaggggaggaacgaaacggctggccggttcgtcgaattcgttttgaaccgggatagccaggccgtctgcaccaaagtgggcggatttgccgccgtggtgccgccctcggcgggcttttacgagcaggaggacccgctttacgcctttgaacaggccatgcgggaggggaagcttttgaccgtgccggcatacgattacgacgcccagcgcaaagcggactttgacggggcgggcatcactgcgctgacgggagaggatgcggataaggtggcgtttggcgaattgtacgaggggttgatcggcttgcaaaccccccattgagtttggtatgatagggaggatctataagctgctgtgcccatagaagggggaacggcttactttgccccgatatgggcaatactggtaaagaacgggggcggccgcgccccttagatagaggacggtaacgaggaggcaaaatgcaatctgatcgaaccggcgcgctgcggcgcctggtagaggatatcgtgccgagggagcgggtacaccccgactggcccatggcacgggagaccaccttccgctgcggaggcccggcggatatcttcgttcgcgtggcggatgaaaaagaactcgtggccctgctgcgcgccctgaaggcggcgggcgcaccctggtttttaatgggcaacggctcgaacctcctggtgcgcgatgggggcttgcgcggcgtggtgttgcagatcggccctgcgtttggcggcacgcaggtgcagggcgataccctgcgcgcccgtgcgggcaccctgctcagccaggcggcacgcgcggcggcggataaagcgcttaccgggctggaatttgccgcgggcatccccggcaccgtgggcggcggcgtgtttatgaacgcgggggcttacggcggggagctcaaggatgtgttacattccgtgcgcgtgctgaaccccgaaagcggggagatctatacgcttgcagcggagcagatgcaaatgggctaccgccacagccgcctgggcgagaccggggagatcgccctggaggcggcgtttaagctggcgccgggccagcaggcggccattttggcccgtatggaggaattaaatgcccgccgtagggataagcagcccctggaaaagggcagtgcgggcagcacctttaagcgcccggagggatattttgcgggcgccctgatcgagcaggcggggctcaagggcttttcggtaggcccggcgcaggtctcgcccaaacacgcgggatttgtggtcaataacggcggcgccagcgcggcccaggtgctttcggtgatcgaggaagtacgccgcagggtgctggagaacgccggggtggccctgcaatgcgaggtgcgcatcgtgggggaggatgggtaggatgcagatcatggcggatgtgcacacccacacggtattttcccacggcaagggtaccatcgagcaaaatgtgattgcggccatggaaaagggccttaaggtcatcggcattgcggatcatgggccggggcatccggcttacggcgttcgcaggcccaaggtgccggccatgcgccgggaggtggacaggcttaaccgcctgtaccatcgggagatacgggtgattttgggcatcgaggccaacctgatctcccgcagcggcagactggatgtgcccgagagtattttaccggcctttgattttgtgctatgcggcttccaccgcggggcgctgccctacgggatcagggatgcgggccggctgtggctgcgcaacgcctttcatccggatgaggacaccgtgcaggataatacccaggcgtatttgaacgcgctggagcagtaccgcatcgccgcgctttgccacctgggggaatatatcccggtggatatggcgcttatcgcccccgcagcgcaggccaagggcacgctgatcgagatcaataaccggcatgccaagccggaaacggcgcagcttaaagaggcgctcagcgccggggcgcagttcatcctctcctcggatgcgcacgaggcggacgcggtaggcggatttgagcgggccatggcgctttgccgccaggccggcgtgccggaggggcgcatcgtcaatgccgcgggctttgccgggcgcaggcccgcctggctggaataaggattacaggatacgaaagaaaaacgccggccccatttcggggcgcgggcgctaagcggaggtgttaagatgcatttggtgattgtaaccgggctgtccggcgcgggaaagacgcaggcgctgcgctacctggaggacatggattatttctgcgtggataacctgcccacccagctgctgcctaagtttgcggaggtaggccaggccgcgggcttggaccgagtcgccgtggtgatggacgtgcgcagcggtaacctgatgggggatttgtacgaggtgctctactccctcaaggattacggctgtacctatgagatcgttttctttgaggcggatgaggatgtgctgatcaagcgctataaggagacacggcgcgcccacccgctgcaaaagcagggcgagttggtcaatcaagccatcgagcaagagcgcaggatgctaagcccgctgcgggataacgccaaccgcatcgtggacacctccaattatactttaaaggagctacgcagctctttggagcggatctttgggcaaaaggcgggcgcggggcagctggccataacggtcatgagctttgggtttaagtacggcgtgccccaggaggcggatctgatctttgacgtgcgctttttaagcaatcctttttacatcgattcgctgcgcgcccatacgggccgggaaaaggctgtgcgggagtatgtgatggatctgcccatgaccaagccttttctggataaatatatcgagattttgcgcatggtcatgccgggttacgtcaatgagggcaaaaaccagctagtcatcgccatcggctgtacgggcgggcagcatcgctccgtcgtcattgcagaggcgatctatgcggcgctcaaggaggatggagcgctggtcagcatcacccaccgggatatgggcaacgatatgaagcggtaaagggccgcgtgaacaggaggggtcgggatgtccttttcatccgaaacgcgggaggagctttgccgcctgccctttggggaggaatgctgcgtgcgcgcggagctggccgcgctgatccacgtggcgggtaccatcaccctttccggcggagagatggcgctgcgcatcgcgaccgagagcgcctcctgcgcgcggcgggtgttccggctctttaagcgggtgtacggcatcgcccctcaggtagccagcggccagaagcggcgattaaaaaagaaccacgcctattacctgacggtgacccagggcgcgcgcgaggcgctggaggatgcgggcctgctctccaaaaagggcggcgggctggtatttaaccgggggatcgaccgggaactggtgcgcagggattgctgccgccgggcctatatccggggcgcgtttttgggcgcggggtcgctgactacgccggaaaagggctatcatctggaatttgtgctctctaccgaagagttcgcccgggacctgatggcgctgataaattctttctcgctgggggcaaaaaacttagctagaaagggcagctatgtggtatacttaaaagaaggagagagcatttcctctttgctggtggtcatcggcgcgatgaactccgtactggcccttgaaaacgtgcgggtgctaaaggagatgcgcaaccaggtcaaccgcagtgtaaactgcgaaacggcaaatctggctaaaacggcgtttgccgccgcccggcagatcgaggccatcacggcgctggaaagcagcggaaagctggcaaagctctcggctccgctaagagagatggcggccgtgcggctggataatcccgaggccagcctgatcgagctgggagaaatgttagaccccccggtggggaaatcagcagtcaatcaccgcttgcggcgtttagaagagatggcgcagcagttgcggcaggaaaagggggactattaaatgttggaaagagaaattaccatcaataacaaagaggggctgagttcgcgcccggcggcggtattcgtacaggcggccaatcagttttcctcgcagatcctgatcaaacagggcaaccagatgattaacgccaagtccatcatgggcgtgctgtccctgggcgtggcccgcagcaatgcggtgaccctgatcgtcaagggtgaagatgaaaaagaggccatggacgccatggtcaagttgatcgaaaatgactttgtgcaggcgtagcgggctgctggcagcaaagttttgataagttttttagcgcggcaggcgctagatagggtaaaagcaaaggcttcctcgtttgaggaagccttttgatatttgcccatcagtattggagattgaaatccacctggttctccatgggttcgcccgccagataatgcttgagattccgctcaaaaatggcgaaagagcgcaccgggttgtggggggaaccgcccgagctgtgggaggagacgatcacattttgcatcttccaaagcgggctgtctgccggcaggggctcaggggtgactacgtccagtcccgcgcctgccagggggccgttttgcagggcgtcaatcagagcctcctgatccacaatggaaccccggccgatattgatgaggaagcttccctctttcatggagccaaggcgcttggcgtccagcagatgataggtatccttggtgccaggcaggcagatgatgaggatatcgctggaggcgaccacctcgtccagcgcatccatcccatacagggcgtccagctccggcgggcagacgtccggatgccggcgcacgcccacgatttttttacacataaagccttgcaggcgccttgccacctgcgagccgatatcgccgtaacccaggatgcctaccgtgctgccgcatatatcccgcaggggctggcagtttttccaaaggggctgttgtccctggcgcacaaactcgtctacccggcgggtcagccccagcagcagcgccatcacatgctcggcgatggggatgccgaagaccccgctggagttggtcagcaggcaatcggggttttgataaagcgccgggtcgcaatactcggcggcgccggcggaggccaggtgcagccattttagctttttgcaccggggaagaaaagctaccggcacgcagccgtaaaaaatgtccgctaggtcggccatctcatctgtcaggttcgtcttgggtacgatgtggaatttcaggttgggggcgatatttcgcagccgttcaaactccggcacggtgaagtctactccgggatagatgctatccaatacaaaaatattgatatattccatacgcgctttcctccttgaacaatgtgtggtaaaaatccccttcctaggcatcatagcacggatggcgggccagggcaattcgttttgcacaatcaccggctggggattggcttttccgttgtaaaaaggtataataatagcgttcataaacagatagaaacggggggaagcaggatggaaacaatccgctttggttttttggggatcggagatatcgcaggccgcgtgatcccttgctttgaatacgctaccggcgtgcgggtggacgcggccgccgcgcgggaactggaacgtgcgcaggcctttgcccaaaagtggggcatccccaaggcttacggctcttatgacgagctgtttgccgatgcggatatcgacgcggtctatatcggcacgccccatccgctgcacgaagatgtagtggtgcgtgcgctgcgcgcgggcaagcacgtcgtttgcgaaaagcccatgggggccaacgccgcacaggtggagcggatgatcgatgaggcgcgcaggcagaaacgctttttaatggaggccaactggcggcgctttttcccggcgatgatgcagctgcgccagatggtgcgcgagggcgcgttgggggaaatccgcctgatcgagagcagctgcggcttttacgccccctggcagggtaatgaggaaaagcgcctgtttaacccgggcctgggcggcggggccatgctggatatgggcatatactgcctctcgtttacctgggatatgctgggcggcaaactcccacagagcatacaggctacggcccaactggcgcctaccggagtggacttgcaaaccgccatgctgatgcaatacgataatggaaccatcgcggtgggcaccacggccatcggcacggcgctgccacgggtgctgcgggtggtcggcagcaaagccgtggcggacctggatgagaatgacctgggcaacctgaacctgacctatccggacgggcgcaaagagcggctgcagttccccttggagggcaagggttatcaatacgagttcatggccgcggcggactgcatccgcgccggccagctggagagcgatatctcgcccttgcaacagagcctggacatggcccgggctagcgacgaggtgcgccgtcagatcggcgtgcattatccgttcgacgaggaggaataagacgatgagccggtttatactctcggcctttgccgatgagatcagcgcgcagctggaccgccagatggatgtgctggaagagcttgatatccaccacattgagctgcgggggatcgatgggaagaacgtggccgattatacgcttgacgagatcgacggcgtgtttgcccgcatgcaggcgcggggctttcaaacctcggcggtggggtctcccatcggcaaggtggatatccgcgagccctttgaggaacatttagagaaatttaaacacgtgttggcgctggcccagcgcctgcacgcgccgtatatccggctgtttagcttttttatcccggagggcgagcaaccgcaagcctaccgggaggaggtgctgcgccggatgcagcttatggccgatgcggcaaagggcagcggcgtgaccctgctgcatgagaacgagcggtatatctatggcgatgtgccggagcgctgtgtggagatcctaaaatctgtacaaggcggtaacctgtttgccacctatgacccggccaattttgtacattgccacgtgcgcaattacccccatgcctatgagatgatgcgcccgtatgtgcgctatctgcacatgaaggacgccgtatatgagcagaatgccgcccgtacgctggatatgggcttccagaatatcggcgacgtgcaccgggcccccggcgagggggaggggcagatcgcccaggtgctgcgggccttctgggaatcgggctacgagggatttttgacgttggagccccacttgtcggcagacccggcggtggatgggccggagcaattcaaacgcgcatatggcgcgctgatgaaggtgctcgatcagatcggagccaaagccggttaagcaatcggctgatgcaatagaaggagggaaagatatggaaaagatgattcgctgcgcgatcgtaggctgtggcgtgatcggcccgctgcacgcaggggctatcgctggggtggaccgggcacagctggtagcggtgtgcgatatcgacccgcaaaaggcggatgcgctggctaaggagtacggcgccacggcttatacggattatgctgaaatgctcaaggatgagcgtatcgacctggtccatgtctgcgtgcccagcgggatgcatgcggattttggcgtgatggcggccaaagcgggtaaaaatgtgttggtggaaaagcccatcgatattaccctggaggcggccgaccggttgatcgccgcctgcaaggaggccggggtgatgctcagctgcatctcccagcaccggtttgacgacgccatcgaggcggtgatcgccgggcgggacgcgggcaagtttggccagctgaacttcggcggcagccataccaagtggttccgctcccaggaatactatgatagcgccggatggcggggcacttgggagttggatggcggcggtgcgctaatgaaccagagcgtgcactatgtggatatgctgcagtacatcatgggggatgtggaggagatttacgcctactgtgccacccgcagccatgtgcgcatcgaggtggaggacttggctgtggctagcgtcaagttcaaaagcggcgcgttggggatgatcgagggcaataccacggccaaccccggtttttatacgcggctggatatttatggcgaccagggcggcgcggtgatccaggacgacgcgctgatcgactggcgtatggccgatggctctccatgcccggatgtggtagagggcgccgacggcaagcccggcggagcggcgagcgcgaccatctatggcgagggacaccgccgccagatcgaggatgtggtggacgcgctgctaagcggccggccgccgcgcatcaccggcgaagaggggcgcaagcctttggccattattttggccatctacgaatcggcacgcacgggtaaacccgttcggctatagataaggggaacgacaggcatcgaaaaaggacaaggaggaacgaaagagaatggttaattttgatttccatgcccctacgcacgtgatctttggtaaggatacggagaagctggtgggcaaagagaccgccaaatacggcaaaaaagcgctggtacactttggcggcggctcggtcaagcgcagcggattgctggaccgggtgattgcctcgctgcaggaggcgggcgtagaggtggtaaccctaggcggcgtacagcctaacccccgtttgtcgctggtgcgcgagggcatcgccctgtgcaaaaaagagggcgtagaggtggttttggccgtaggcggcggctcgacgatcgactcgtccaaggcgatcgccgtgggcgtgaaatatgacggcgatgtgtgggatttccacggcggggataaaaacggcaataaaccgacggtgaccgaccgcctgcccctgggcgtggtgctgaccatcccggccgccggcagcgaaatgagcaactcctgcgtgatcaccaacgaagacgggatgctcaagcgcggctcttccggaaacggcaaccgcccggattttgccatcatgaacccggtgctcacctatacgctgcccgcctatcagacggcctgcggcgccaccgatatcctggcccatatgatggagcgttatttcacacctgaaaaacatgtggatctgacggaccggctgctggaagccggcatgcagacgctgatcaaaaacgcgcccatcgccttggctcacccggaggattacgattcccgcgcggagatcatgtgggtcagctctctggcgcataacgacatgctttcctgcgggcgcgtcagcgatttttccagccatcagatcgagcacgagctttccgcccggtacgatgtggcccatggcgccggcctggccgtgatcttcccggcatggatgaagtatgtgtataagaaggatgtcatgcgctttgcccagtttgcggtgcgcgtgtggggctgctcgatggactttgagaaccctgaattcacggcgctggagggcatcggccgcatggagaagttcttccagagcatcggcatgcccatccgcctgccggagctggggattgacgaccaacacctgcgcgaaatggccgaaaagtgcaaaaagtccaatggggacggcacccagggcaagttcactgcgctgaacagcgacgatatttacgagatttacaaactggccctgtaaggcaagagaacaacaagcagcgcccgcgcataaagatgcgcgggcgcttttttgattttaaccaaaatcgtgccggttgccgcaaccgctgcccagccctttgtagatgctaacgattttttcgatcttcataaaacattcccggtcatccaagctgtcgtcctccagaacggccttgatctgtgacagagcctgatagcaattatcagagagcaaaggcgaaagacatttagcgaacgcagacggatcacccggcacgttttcaactaaacggataactatatcatataacagctccataaaatcgtctacctcactcttatacgtttatgtaacgtactttaagacaaaactagtgataaagtcaagaaaaatacgtggtattagagtgaaacggtgaaaaagattacttttggagaaaacaaaaatattatttctggtcggctcaagtgctaccgtatcaaagccgggctttcgcaggcccagctggctgcgcgcatgcaaacgctgggcgcgaacatggatcagcagatgatcagcaagatcgagcacaatgcccgcatcgtcaccgattatgagctggcctgcctttgcaggatattggaggtgcgtgcggaagacctgcttgtagattttcgtttctgaaagagatggtgttccttcccatctccccaaggcttaaacacgcgccggggccattggctccggcgcgggtttttgttataataatattattcggataagcgaatattatgtagaatcgcggggattttaaaatgagttttgtacacctgcataaccactcggaatacagcctgttggatggagccagccgcatcggcgatatgttggaccgctgcaaggaactggggatggattccatcgccatcaccgatcatggggtgatgtacggcgtggtggagttttaccagcaagctttaaagcgcggcatcaagcccgtgatcggctgcgaggtatacgtagccccgggcagcatggaggataagaacaccgccgcgcgggaatacgcgcacctggtgctgctgtgcgaaaacaatgtggggtatcaaaacctgatcaagctggtgtccctgggctttctcaagggcttttactataaaccgcgggtggacatggcggcgctgcgccaatactctgaggggctgatctgcctttccgcctgcctggcgggggacatcccccggctgctgcgggagggtcagcccgataaggccgaggcgctggcccgggagtttatcgacatctacggcaaggacaattattttatcgagctgcaggatcacggcatcgccctgcagcgccagcttaacccgcagctgatcgccctggcgcgcaagctagacctggggctggtggtgaccaatgacagccactacgtccgcaaggaggatgccgaggcgcacgacgtgctattgtgcatccagaccggcaagaccgtggaggacgaagcgcgcatgcgctttgagacccaagagttctatattaaaagcgaggaggaaatggccagcctcttcccacaatgcccggagtgcatcaccaatacagccaagatcgccgcgcgctgccaggtggattttgactttaacaccatccacctgcccgccttcgcgccgccggagggcctgagcgcccgggattatctgcgcaagctgtgtgaagaggggatcgtgcgccggtacggccagcctactaaggagcagcgggagcggcttgcttacgagctgggcgtgatcgagcagatggggtatgtggattacttcctcatcgtgcaggattttatccgctacgccaaggatcacggcatcatggtgggcccgggccggggcagcgctgcgggcagcatcgtggcctactgcctggacattaccaccatagacccgatgaagtaccagctgctctttgagcgcttcttaaacccggagcgcatctccatgccggatatcgacatcgacttttgctacgagcgccggggcgaggtgatcgactacgtcgtagaaaaatacggggccgaccgggtggcgcagatcatcaccttcggcaccatggccgcccgcgcggtgattcgggatgtgggccgtgcgctgaacatgccctacgccgaggtggatgtggtggccaaaatgatcccctttgagctgaaaatgaccatcgacaaggcacttaaggccaacccgcagctgcaggcggagtacgagaacaatccccgagtgacccggctgatcgatatgtctaaaatactggaggggctgccccggcacgcctccacccacgcggcgggggtggtgatcgccagccgtcctgtgacggattttgtacccctggccaagaacgatcagggcgtagtcacccagtataccatggggatattagagcagttgggccttttgaagatggactttttgggcctgcgcacgctgacggtgatccgggatacgctagacattctgcgcttgaccggcgctacgccgccggatatggaccagatccccaatgacgacccgaaagtatatgagatgctcagccgcggggataccgacggggtgtttcagctggagtccgccgggatgcgcgcctttttgcgggagcttaaaccctccaactttgaggatgtcatcgccggcatctcgctctaccgtccgggccctatggattccatcccgcgctacgtgcagggcaagtaccacccagaaacggtacactacgcccatcccaaactgaaaaacgtgctggacgtgacctacggctgcatggtctatcaagagcaggtcatgcagatcgtccgggatctggcgggctactccctgggccgcagcgacctggtgcgccgttccatggccaaaaagaagatggacgtgatgcaaaaagagcgggagatcttcatccacgggctggtagagaacgggcaggtcgttgtgcccggcgcggtgcgcaatggcgtggacgagcgggtggcaaacgatatcttcgacgagatgatcgcctttgctcagtacgcttttaacaagtcccacgctgcggcctacggtgtagtggcgtatcaaacggcgtatctcaaggcccattacccggtagcctttatggcggcgctgatgaacagcatgctggagcgcacggataagattgccttttacatccaatactgccgcaaaaatggcatcggcgtactgccgccggatatcaaccggtcgatggagcgcttttcggtggagggtggcaatatccgctttggcctgggcgcggtcaagcgcgtgggcatatccgctgtacaggaagtggtgcgggtgcgggaggagaagggcgcctttacctctctaagcgactttttgcagaagatggagggcgaggcggtcaacaagcgcatgctggaaagcctgattatggccggcgcttttgaccatatggggcccaaccgcgcccagctgatggccagctatgagaccattgccgacgccgccgcgcaggaccgcaagaataacctggccggccagctctccctgtttggcgagccgggcagccccgccaataccgcgggggaatttgtctatcctcaaatggcggattaccccatgcacacgcggctttccatggaaaaagaggtcacaggcatctacatctccggccatccgctggacgattaccgccaggctttggagggcctgccctttaccacccagcacttccatcaggacgaggaggagacggtgttgggaacgcagggcgagggtgcgctgcgggacgggcaaagcgtgaccttgggcggcatggtcacctcagtcaagaccaagaccacccgcaacggcaaccagctgatggcctttttaaccctggaagacctgtacggcgcggtggaggtcatcgtcttccccgcggcctatcagacctatgcttccttgcttcaggaggacagcgcactgcttatcgaggggcgggccagcctgcgcgaggatgaggagggcaagctgatcttaaatacggcccggccgctgggcggctcgcagatgaaaaagctgtatctgcggctggaacaagagcagttggagggagccaagaaccttttacgccgccacccgggggcgattccggtgatcttctactttgcctcccaaaagcagaccttcgcggcggataccgccctttggtgcgatggctcgcagccgctcaccggggagctgggggcgctgctgggcaaggaaaacgtgcgccccacctttgaggagtctgccaaaacggcaacatgatgaatttcgacaaagaacgttaaattattcacgatatccctagacggagatggggctgcttggtataataaagaggatttgttgtttacatggggttaggaggatcttaggctggtggataagtatcagggggaagattatctgtgcatcaaggcgctggaggacggggtcaacattatcgggatgacccggggccagagcaccaagttgctgcataccgaaaagctggataaaggcgaggtgatgatcgcccagttcactgagaatacctctgctatcaagatccgtggccgggccgagattttgacccggtatggtaagctcacttccggtacggaggattaatcaaatgtggatggtcattcatatggtgcaggggaaggccgctgcccagcgcctcatgcaggcgctgacccaggaggggtttatggtgcggctgcacgcggtctaccgcaaccgggaggatgcgcagaattattttgagctgcaggtccccaaggcggaggcgcaggaggcgcgcgccgccttgcaggataaattgttttagtattttctgcttgccggttaccctggcagggtagaatatagaggaagggctcccacggatgggaaaagtgatgtggaaagagggatacgtatgaagaggatcgcagttttgaccagcggcggcgacgcgccgggcatgaatgcggcgcttggtagcgtggtgcgcagcgctacgcaaaaggggatggaagtattcggcgttgagcagggatatttaggactgatagaggaccgcatgcagctgatggaacccatgcgggccaccggaatggtgaccagcggcggcacgctgctggggaccatgcgctgcagcgagatgaaaacggaggaaggccgcctcaaggcggtggagaccatccgtaaacacggcattgagggcctggtggccatcggcggggacggtaccttccgcggggccgaagtgctgtgcgggtacggcgtgcccaccatcggcattcccggtaccatcgataacgacctggcctatacccagtacaccctgggttttgatacgacgctgaacaccatcgtgcgcatggctacccaaattcgggataccatggcttctcacgagcgtgtgtgtgtgatggaggtcatgggccgccactgcggcgatctggccctgtattccgccgccgccctgcacgccgaggcgttgatcgtgccggagatgccctgggatgtggattcgctttgccagcggttagagcgccagcgggccaacggccgccgctcggctctggtcgtgatggccgaaggcgcgggcaaggctacggagctggcccccgtcatcatggaaaaaaccggttttgatacccgcgcaagcgtgttgggctatgtacaacgcggcgggcagccctcgccccgggatctgctgatggccacccgcatgggcgtgcgcgcggtggaactgctgcatcagggcatcggcaaccgggtgctgggccagtgccaggaagagatcgtggactttgacatcaatgaggcgctggatatgccggcggtatttaataaagaactgtacgagctggtgcagggcctgtgggcctaaccctttctgggagcgaaattgaccgatggaaccgggcgaaggatatgactttcgcccggtttttcaaatgcctttgatacggctgaggatacgtgacagcgtttgggtacgcattgccgtgcgttgtgatactagagcgcacatgatcgtacgcgtgccggcaaaatgagaaaatgccccggtacgaggcaaggctgcccatataatcaacgaaaaggccttggcacaagagaaggacaaacaatgcgccaagcgataaaccaatacaagcaggggagagaatatggcaaaaaagaaatttcaggcgtttccctttcaggtggggcagcggatcgaactgcctatccatgccttgggcgagggcggggtaggcatcggccgttttgaaggcgcggcggtatttgtgcccggcgcgcttccgggggaaaccgtgcgcgtgcgcatccgttatctggcctcgcgctatgcgcaggcagaactcgaaaagatcttacagccctctcaccagcggatagagcccccctgcccatatgatgcgcgctgcggcgggtgtcagctgcaacatctttcttacgagggacagctggaagccaaacgcagacaggtcgccgattgcctggagcgcatcggcgggtttgaaaacatcgccgttccacccgtactaggcatggaagagccctggcagtaccgcaataaggcggccttcccggcggcgacgcaggggggagaggctgcgctgggcttttatgcaaccggcagccatgatctcgtgccggttgacgcatgcatgatccagcagccgccctgtaatgcggtactatccgccgttaaggtctggatgcgggagagaaacatcacgccttacgatgaaaagacgcgtcagggcaggctacgccatgtgctgatccgcaccaaccggcggggggaatttatggtcactttggtgatcaactgccaacgcttgccggaggcggccgcattgggcgagcagctgcgcggactggaaggattcgtaggcttggcgctgaacgtcaaccgcgaggcgacaaacgccatcctggggcgggaaaccatcagcgtatgcggcgcgccggccctggccgagcagctggatgagctgacattttccctttcgccaacctcgtttttccaggtcaacccgctccagaccgagcggttatatcaaaccgcgctgtcatttgccggcctgaagggggacgagctggtgtttgacgcttactgcggcattggcagcatctcgctgttcttggcgcgcggggcaagggaagtgatcggcgtggagatcgtcagggcggcggtagaggacgcgcgtgaaaacgcgcgaagcaatggcataagaaacgccagctttatctgtgcgaaggcggaagaggagattccacggttgcttcaagacaaccgaaggccagatgtggtggttgtcgatccgccgcgcaagggatgcgatgcagcgctgctgcaagccatctctcaagcgcggatccccaggctggtctacgtgtcctgcaacccgtcgacgttggcacgagacctgaagctgctgtgcgggcagggttacaccctgcaaaaagtacagccagtggacctgtttccgcagacgatgcacgtcgagacggtggctagcctacagcttgaactttagagaagccgcgccggtgtacttgtgaggcaacttccgcttgttgcatgtttgatagctattcttgcgatctcctgtcaggtgagttatgatgactgtaaatggaaacgttgtcaaacttcataaaggggaggatgcaagatggaaaaatgcaataccaagaatgaaaagttgtacaaattgcgcgttgaaaatggttatacgcagcgcgaaatggctgagctcttggcggtttcacctgccacctatagccgctatgagaatggccatatcgacatgtcgctggctgtgtgtaaaaagttgagcgagcttttcggtgtgcagatggaaaagctgttataatggagggcatatgaataccatcgatatcgtaaaaaagatctttatccagatcttacaggatggcaggccccataaggtggaggagatcagggcaagggtcttgcaggaatatcccaccctttttcccagccgtaccgctttttacgcaaccgtatcgcgcatacaaagccgggaaaagagcatccggcgcatcgatagaggcgtgtatatactgcagggaaaagcacaagcccaagaactaaaggccctgcctgcgaactgggatctggaaacgtattttcattggcttaaggatatcttggatcagatgcaggagaaatccgcttttgtggactatgagcggatagaaccagctgagattatctctttgcgggagataaaaaagctgaatgcggagctgctaaactttctccaggagcggcaggacgccgctgctaaattgatggagcagatcaagctgctgcgacagatggaagagggggagaagccctgcggcgatacgcgggcaactgtcaaacctatagaagcagctgatgacagcgcagatggtaactgattctatatatctgccaacactttgaataatgcgtgaaggatacaaaagcgctaaaaacaagattatgtgggataaagaaccttttaggtcataatggacgggaggcccctatgaagatatccaaaaaagacgcacggatgtggtttgaatttttcgcggcgctgccggaggaagaactgctgggcccaaaacagcaggagatcgcctacgccgcctttgcgcagatcgaggctgcggtggatgcgcgcaatgaggcgctgatggcgcagatcgggcggctgcaaagcctggaggggcgcacgctgtttgtgggcaacgcggagaaattcccaaagggctgccgctcctgtctgctggggacggggcttagcgccatccgcaagaccaataagtgcaacattgcctgtaagttctgctataattacggcgagctggaggatattccgccggtgggcgagggaatgtgggagatcggtggcacgaaattttacgaaaaggatattgacctgctgctttccgtacagaataaacccactggggtttcatatgtttatctggaaccctttatggagatcgaaaagtattatggcgtggtgcgcaagttcagcaacgccggtgtgcatcagcatctgtacaccaacgggctgctggcaacagaacaaacgcttcaggcgttgggggaggcggggcttgacgagctgcgctttaacttgggcgcatccaactgtgccgataaggtgatcgaaaacatcggcctggccaagcgctacatcccccaagtaggcatcgagacccctatgacgcctgagttttatgaggggttcatggctaaaaagcaacagatattggcaacagggctggactttatcaactgtgcggaactgcacttgaatcccaacaacattggcaattacgcaggggagagcctgtatctggcccgacatggatatatctcgccgatctggagccgggagctcaccctgaaattcatgaagatggcagttctggaagattgggacctggcggtgcacgattgctgcaactataccaaattcgtccgggggctgaacctgcgcggcaaggagggcgcatggtttggcgcaagcgattatgcctgtgagtttggacggctgccctacgccgcttttttgcctgtgctgaaggatgatagcttgccgtttttaagcgaggagccgctgccagcgggctatggcccaggcgatattgtattttgacgcgcattatcaatatttgatagacccgtcccctactcgatcctatgggtaggggattttcatatcaaaagtggaaaatgtgcttaaagggtgcggtacaagatagattttaaaatgcagacggaccttatgggttgtagccgggcgggtataggggtatgataaacataagggtattgcccggacaaaagaaaagttttaaaggaggattttgtatggcaaaccgtatcatgctcaacgaaacatcttaccacggcgcaggggcgattggggagatcgcttccgaggcaatggcacggggttttaaaaaggcactggtctgctcggatccggacctgatccagtttggcgttaccaaaaaggtgaccgatgtgttagacgcggcggggcttcaatatgaaatctattccgatatcaaggctaaccccaccatcgacaacgtgcgccacggcgtagaggcctttaaggcggcgggggccgattatattgtggccattggcggcggctcctccatggataccgcaaaagcgatcggcattatcgccaccaatcctgagtttgcggatgtgcgcagcctggagggcgtagcgcctacgaaaaagccctgcgcccccatcatcgcggtgcccaccacggcgggcacggcggccgaggtcaccattaattacgtcataaccgatgtggaacgcaagcgcaagttcgtctgcgtggacccccatgatatgccggtggtcgccatcgtcgatccggacatgatggcgtccatgcccaaagggctgaccgcttccaccgggatggatgcgctgacccacgccatcgagggctatatcaccaaggccgcctgggagatgaccgacatgttccacatcaaggccatcgagctgatcgccaaatccctgcgcggcgcggtggacaatacccagcaggggcgcgatggaatggcgctggctcagtatatcgccggcatgggcttttctaacgtggggctgggcatcgcccactccatggcgcataccctgggcgcggtgtacgatacgccccacggcgtggcctgtgcgatgatgctgcccatcgtaatggaatataacgcgccctgcacgggagagaagtaccgccagatcgcccaggccatgggcgtgcagggcgtagagggcatgagccaggaggaataccgcaaggccgcggtagaggctgtggccaaactctcggcagatgtaggcatccccgccaagctgcccgcacttaaagaggaggatctgcaattcctggccgaatccgcctttgcggatgcctgctgcgccggtaaccctagggataccagcgttgaggaattaaaagacctcttccgcaagctgatgtaaatgctaaacagcaagctttaaacacaaaagacatggcccgcttagggccatgtctttttttatatgcacttctacttttaatctttgcgccagcgcttgagcttgggaaaataggcccgcatggcctcccgcgccgcgtcctcgctcatacccgggttagaggccaccatgggcgatacgcaaaactcgatcatctcttccatggtgcaatccgccgtaaagctgccatccacataacaatacttgcagtaatcctggcttttgcgcccatcggcctcgttgcccaacatctcttcgccctgccctaggggcatgccgcagcactggcaatatctctcttgcatattcagctctcctttcgcgctggcttgtcccagctacaaccttagcatacgcctcaaaaggtgacagctgcctgtcatcttattgtggcggatagagattttttatgccctccgcagcctggcgcagcatgcgcgctacgcagcgtggctgcaacacccgtaccccggcaccgaaggagagcagatacccatacagccagttatcgtgcggcagatcgaccgtgacggtgagatcgccgtttggctcttccacgatattttcaacatcaaactcgtcatacacccggtaggccatggcatgagtaaaacgcaggctaaggtgcgccactatgggcggcgacgcgctttcatcctccatggggggaggcgtcagccccgtccggtcaaaagtatccattccagcggccagtccggtcatccgattgagtttaaaggtacggtaatcccgcttttccaggcaataggcctgcaaataccaggccttggacttaaagaccaggcgcagcggatagacccggcgctgggtgatggcgccataggagctggcgtaggtgaaagatagcacatgttggtgaaggaccgcgtttttgagcagatcaaacttggctgcgtccgcagcggcattgccccagcggcttaggtccaccgcgatccagtcggtttcatccttggcgaagatggcccgcagcttgcccaacacgccggcggaatccagcgggccggccgcacctaggctttgcaatgccaaaagaatttgatcctgctcctcatcggagatcacggcccgatccagcacgtaatgctccatgatggcgatgccgccgccccggccaggctcggtatagatgggcacgccggcctgggacagggcgtcaatatcccgcaggatggtgcgccgggatacttccagccgctgggccagctccccggcggtcgcccgcccttggcgcagcaggatatagatgatctcaaacagccggttttgttgcatagggcgcctccttatctcctatcctgagtataacacgaaaaggagtcagatcctgtcatctttttgtgcggcgtaaaatcgtatgatgtagggcggtgtttgcgtttgggcaaaattgctgtgctgacccagcgtgttaaagggaaatcatttttcacttctttgccaaatcgtgataaaatgaaggcatcactgctataaggagaaaaggcgatggatgagcagattgtagcgaaggttgccagggcggtcagctttatgcagataatcgagccgcttaaatctgccactcgcacggcatggacgcagactggccggcgagaaagcgtagccgagcactcttggcgcctggcaatgttgggcctgctggtatccctgcaaaaccagcatcttgacgggggacgactggttgcgctttgtttggtacatgatctggcggagtgcttgacgggggatgtttccgcggctgcaagaccggacgccgcgcaaaagcgcgcacaggaatatagggcgatgaaggaactgtgcgcaccgctgtctgctctggagagagaagcgcttttctccctgtggcaggaatatgaggaggggacgacctgcgaagcgcgcatggccaaggcgttagataaggcggagacgattttgcaacaccaggccggaaagaatcccccggcatttgactatgcctttaacctacactatggcaaagattattttaaggacgatagctacttggtcgcgttaagggcggcgctggacgccggcacgcgccagcgggcgtgccgggaaagcagcccctgtggtggtagagatggcccgcacaagaaaggctgaggaaatgatggacaagcaccgaaaaaaatcgggcggatttcactgggagccggtattttattggtagcgctattggtcaccttttttggggtgacggtgtggaataccaatcgattaatggatcaagtcgatacgctgaccaaccatccctttaaggtcgtgatcgccataggcgactttaacacccaagtggctaagatgcgcgcgcaggtcgagcggctgctcatcgataattcgcaggatatcgtgcgggatgcttgggacaatctggatgagatctaccgccaggcgcaggaatcgctgtatcttgtagaagcgcgctatctgggcccaaaggagaatgtggatcagctgtttgataagctcaaccgcgccttgcagcgggcagaacaataatcggtttcttcagtgttatataaagcaaaaagcgtccgcacgtgtagcggacgcttttattattggaaaggaaactggctggtgaaaagcggcgcctattttttgccgctgccctgaagcaaaagcagctctttattcgggcggctgtcatccagcaaaaaggaggcccatttcagcgggggatcgtctacatgctcctgccaataacgcagacggtgcaaataccaggcgatctttttctcaataggctctgtacagttggctatgccaaagtggtggacgattgccgtcagctcataaaagggcagccccagcgcgtgagtttccacgtgtacggtggcacaggcctgccccacggcgtgaaagagggcgatggctaccggatcctctatcgctttggcggcggcatgcgcttgcagcagcgcccttttggcggcgggcatcttaatctccccccgggcccactggcggcaaagggctacagcctgcccgggccgctgttcgttggggtaggtttgggccagccattggagcgggacagaaacacaatcgaaagcccaaagcaccagcgtacggtgcttttgctggcagatcgtcccgcgcagttcttgcaggcaggcgctatcccgggtaaataaaagtttgttgccgcgctttaatctttttgcggcgtcggctaatgcaatttcttccataatagagacggttctccttttttatatgtgcgcggcaacggcatgcacgccataggcccaaaagccataagatagggagggcgcgccctttttaaaagcggtaatgcctcccgcgctggccggaccagcggtcgatccccacgcggcggatcgtgcgcaggttatgcaggatatccgggtgcagctgctgcatatcggctatctgcgcgcagcgctcaaaatcggggcaagcccagcagacgtacaagcttcaccctgcaaaagcctgatctcaaaagccatagcgcatcccctttttactttgtattatagtgactgcgccgcgatatgggaaggaggttttttgtggagaaattgcaaaactggtactaaagcagaacaaatgtagcgctatgtcacaattccttgaaatttgcaccggcgggcgtataatggggaaggattgaattcaaacgtaaaaagaatgatgaggcgatgggaatggaaagttataaatttctgtttgatctggcgctgatcctgctgagcaccaaggtgctgggactgttgaccaagcgtttttccatgccgcaggtagtaggcgccctgctggccgggttgatcttggggccggcggtgctgggggtgatcacccagacggacttcatccacgccacagcggaactgggcgtcgtggtgctgatgttctgcgcggggatggaaacggatattaaagagctgaaaaagagcggcgccgcttcgttcgttattgcattgatcggcgtgatcgtcccgctggcaggcggctttgcggtggcctatttcttcaaccagcccggcgtgatcgattcagacgccagctgttctctgtttttacagaatattttcatcggcatcattttaacggcgacttcggtcagtatcacggttgaaaccttaaaagagctgggcaagctcaaaacccgctcgggcaacgcgattttaggcgcggcgatcatcgacgatattctgggcatcatcgccctgaccattatcaccagcctggccgatacttcgatcaacgtggcctttgtgctgctcaagatcctgggcttcttcgttttctccggcgtggtgggctttttgttctacaagttttacaccaaatgggtggtctctaccgagagcggcctgcaccggcacgtgatcgtagcctttgttttctgcttgctgatgagctatgtggccgaggcggtcttcggcgtggccgatattaccggcgcctttgtggcgggcttggtgatctcctgcacccagcgcacgcgctacctggcctccaagttcgatgtgctcagttacgcttatctgtcaccggtattttttgccagcgtaggcctgcaggtcaagctgccggagatgacggggagcgtcatcgccttttcggcgatcctggtggtagtcgcgatcctgaccaaggtggtgggttgcggcctgggcgcaaagctgtgccgctataagaattaccagagcgcgcgcatcggcgtgggtatgatctcgcgcggcgaggtagccctgatcgtggccagtaagggttccgcgctggggctgctggggtcggcctttctggggccggtggtgctgaccgttatcatcactaccatcattacgcctattctgctcaagatcgtgttcaagtgggggccgacccagacaccggaggtggaaaagggcttttcggcgccgtatgaagagatcaacgccctgcgcagcatctctgagaattaccccaatgagccggaaagctaccgcagggagctagagcagtaccgtggacagtttcaagaagcgcacaaagagcggatggataaagaaaagaaacggtgacccgagataaaaagggcgcgtaaagtttggctttccgcgcccttatctccactgtactatttttcaaagatcagatcgatcttcaggatctttccactggggcctatttgaaccggcaagtaacctgcgtaacggtaccccttttgagcatactctgcgatgatctcgcggtgctgcttgagctgtgcggtagcggtcttgtggttttcatattctaacctcacaaaagtatagttcatcaatctccgccctttccctttccaaagtttaaaaagctgttgctgccctcgcattttaccatggcgatacccttggatttatcgcccaccaccaaaaggatatcgccctgctcaatttcaaagacctcccgcgccttttgcggcagtgcgatgattccgccctcttctaccatggcgacgccgaaaatatatcgcccgtcatcttcaggcaacttgagcagtttgtccagcgactcgttgaccagagcgtctagcgaaacgttatagatttgggcaaggcccctgcatttttcgatatccggcaggctttcaccattttcccatttggcaatggtttggcgcgatacgcctatccattcggccagcagctccatggtatacccgccgtgcatccgcagcgcccgcaggtttgtggccagtaccgtttgcatgcttttcacctccactttttattatagaactgacagggtgtttggcaatcaaccaggattaacaacgcttgttaaaaatagttgcgtataataagaatgcactaaaataggatcgtgaaacagaggaggataaaaatgggctgcagcgatatagagcggctgatgcaatattttaacggtgtgtcggaaatgatggagttgtttgaagcgctggataaaaaggtacgcgctgcctttccgaagagtacgcgcaggatacaaaaatcccaaatatcctatgatgcacagggacatttgttttgtgcgctctctaaaccagtgcaccgccagaaaggctggcccgccgtttcgatgatcttgacatttggcctgggtacgccgttggattcgccccgcatttttcaggttgtacagccctatccgggccggtggacgcaccatactttgctcgccgcccccgaggagctagatcaggaaatgctgggcttcctgggacaggcctgggcgttcaccctgcttaaatttcaaagccggggacgcggcttttcttaaagaaaaaggctatacagggcttgacttggagtttgctccatttgataggatgagtccgagaagaaaaggagggatgagcgaatgcgcaaaaaagcgattttgcccctgcttcttggaagtttactgctccttgtggcctgcggcgcaccaaaggacgatgctgacggagctgccaggacgccgttgcctgcgccttgccccacagtgcagacgcaggagggtgagggggaacggatagtccgcatgcagctggaggaagggaccgtgctgatatctttggaggacaatgctacagcggacgccttgttggcacagctgccttgcaccatgacctttgaagattatgcgcatgcagaaaagatcagcgacccgccagcgccgctggatcttacgggggcgccagatggatatgacccagaattgggagatgtggcatgctatggcccctgggggaacatcgccattttttaccaggaccgcggctacgcatcggggctggttccggtaggacgcgtaatatcagggatggagctgatacagtctgcgcagactgcgttcaccgctacactggaacagacgagcgatccagaacagtaaacgaagattacgaacttgctacggaataaaaaagcctcgcctgagcgcggggcttttgaacaggataaccggatcaagcttcttcctcgtccagcgcgtcgcctccctgcgcctcggtgttgagccattcgctgttgggccggcaaagcagccgggcatccaggtaagcctgctgtagggtaaggatggtctgtccctgatagttgcccgaacgggtcagctccaccaccaaagcggcatcggcccgtccgtcatactgcaaagagaggggcagcatcaggctcataacgtttcgggtggggaaatagcagggaatggcggtcttaaagttccagcgcacctgctttttggccagttcaatggcgtcttctacccgattgcgcagccggttatacaatcgcggcgtatcggcaatgacgccgcttagctcgctatacagcgtacgtttggctgcggcttcatctgtactttgaatctgttcgagcatcgactgcgccgcgggtataccccggctttcctcctgcaaaaagggcaggggcaagcgggagacgttatccagcagaatatggtcaaagtccgtatgcagctccttttccaggtcaaagagcaggtcctctttgcgctcaaaatacgaggcgggctggggcagggggttaaaggcgtccaccaagcgcttgcctacgccccggccggctgccgtacaaaaatcgacaaagtgccaggccgtagccgcgccttcgtcgttgggttcaaaacaggcgtacagatcgtcatagtgcggggtgacaagtcccgtattaaaggcggcaaagctcttatcctcggcaatgcataccttatcttccagctgcaggcggtaaaaggtatattgaatgtacttttgcagaatgtggtaacgcttatggctgccttccccgaaatcccagggctcgggcagggctttttgcgccaaaccttccaaaaaggaggaccaggtccccagaaaagcgaattgttccagcatttttcccggggcacggccgaaccggtccggccctgcaaaattgagataccagggagaagcgccggcatagtcgctattcgagcgcttgatggcggcaaacagcgccccgccttccagtcctttaaagggcagggggaagcggtaggcgtcgttccggtattccaggttgccttcaagacgtgccttttcgtaagccgcgcgcagctggtcgatcacggcgggggctggcggcgcttcctggccagtcaggtaggcgtttaggatagccaatgtcttaggcgccagaaagaccgcctcatccatgcgctgtggcggctcctctgatcccccaacgtgtgcggcgggctgggatgcggacggctgctcccaatgcgcctgcggatggatggtgaccaggctttgcggcacgccgcccataacctgatcttccagcgtcagcatgtcgcccagggccagcaaaaaggccttcattttggcaaaaccataccgctctttagggtatccgttatccgccagctgcttgctgacggcggccatatgcagcttttcgccggtgggcagttgtccggtcagtacgtggtagatctcctggcgctccgcttcggtaaaacggtgctcgtctgcctttgccgtatgctggcgctgaatgggcgcctgcgccgtattcgttatcgccgggcgggccgggacttcctgcatatggaaagagaaatgccaaggctgcgagctttcagcataccagcttttttgcagcacaatatgggcgggccccacgtcataagccaggttatcgccctcgctttgcagagaaccctcgcttttggcgcgcttgtacccctgctccaatgcggcacgggcctccggttcggtcagccccatcaggttgcagaatacggccagcgacttggcgggcacgttgaccagacggaaaaagttttcctccggtgaggaccggtcattcggggcgtcgtctgtccaggtgtggagggtgatcatttgctgggggttttgccccagcatgatcggcgtgaccgtaagaaattccggcagatcctctaacagcgcgcgcattttggggtagccgtaggctgcgcttcggatgtccgcgtctgttaaaaatttggcgatacggctgaggggatacgcttcccccaggctaaaagccccagtcagcagttcatagatccggtgtttggtctgtatatccattgatgtgatcgtctccttacctgcacgggtcaatccaataagtacaccatctgtatgagtattatactatacaagcggtgtgcggaacaatccgccgccggattttcatcttttccattctgccgcgcatgaacgcgcgggcgaggcaatatattggctttagagaagcatgcggggcgccggaacatcacctaaaacatgggcacgtgcacggtttcagagcctgccgctataaggtaaagcgctcaaaggttacagcatgtaaatatgtcctcgcagggcggttttttgtcgagaatctattgaccattggaggggttagcggtactatataagtggttcgtttctatatatcatccttgtataaaaactacgagctaaattaaggaggaaacaaaaatgtctctgagaatggggatcatcggcttcgggggaatgggtaacctgcacaatcgcgtatatagcgcgatcgatggggtagaatttgtagcggcttatgatattgatccaaagcgtttggaccaggcaaaagaggccggactgaccgcttatgagacactggacgcgttcctggcggatgaccggatcaatttcgtactggtcgccacgcctaaccacgtgcataaagagttggcgatcgcggcgatgcgcgccggcaaaaacgtaatggtggaaaaacctgcgaccatcacctcggccgattttgaggagctgatcgaagtttctaaagagtgcggcgtggtgctgacctgccaccacaaccgccgttttgaccgggattatctcacggtccgcaagatcattgaggatggcctgatcggcaagcccttcgccatcatgagctcggtgcatgccaaacgcggcgagatgcacggctggcgctgcgagaagcagtacggcggcggcatggtgctggattggggcgtgcatctgttcgaccagatcctgacggccttccccgagaagaagatcaccagcgtctttgcccagacggcttccatcaaaaaccccggcgtagaggatttcttcaaggtccagatgaccatggacaacgatctgttcgtcgaggtcgaggccggtacctactgcctcaaaccgcatgaccgctgggtggtattcggcgatcagggcgctttcaatattaaggattttgcctgcaccgatggcggcatcaccactaccgattatgagctggccaaccagtctcagggcgatatcgtagtgctcacccccgctggcccgacgcggaccatgagcccgctgcccgccggcgccgagtacaataccgagctgcccctcatcgatgtgagcgaggaaggcctggtagcgtatgaggataacggcgcggtgttgtactcccgtctgtacaagaacctggttgacgtggtagacaatggcgccgaactgctggtgaaacccaaggacattctgcgtaacatcaagttcatggaggcggtgttcgagtccgccgagaagggccagtccctgaccatcaacctgtaaatagcgcttgctgtaacgccaaagcggcggcagataaattctgccgccgcttttttgtttttctgagcggagggtattcagatacaacagcggaaagcgcaaaagaaaaaacatggaattttaattggcccgtaccattaatccggagtcggtcaactctctatgcgtagccctattcattgcagtataacaaggcatgattgtgatttgtgagccaggctgataagaacagcctattgtaaatatatcttatgtatgaaggaagagggttaacatggagtttgccggcatttgacagggcatgcacaaggctctataatatttggaggtatgtttaagccgatttttagggattataggcatattatacaacgataatgtattagttaggggttatggatataaatgagcgatatcaagatatttatttcttgtaatcgggagagttatgtaccccagcatccgctgctctatccgatacagacaggcgcggccaataccggccgccattttgaaggcatgttgcacgatgatgagggagaggaccagatatcgcatcgcaataccacgtattgtgagcttacagcccagtattgggtgtggaagcacatggatgccgattattatggcttcatgcataatcgccgttatatctcgttttcaaaggaacacttgaaagaagatatgtatggcaatgtcgtcatggggatgatcgacgcagccgcactggacaagttaggctaccagccgggtaatatgcgacgcatgatcgaggggaacgatattgtggcgctggcgccgctggatatcagcaaatgcacctggctgcctaagggacagcgtacggtgcgtgggcaatacgcgtctggtcagcagcacgatacgggtgacctggacctgctggtttcgatcctgcgcgaaaagtaccctgaatatgagcaagacgcgattgattacttgaacggcgataagggttattaccttaacatgtacatcatgcgcaaggagatttttaatgcctacagcgcctggctttttgatgtattggatgcctttagcgccaaacaggattatacaaatttttctaattatgagatacgcaaatgcggctttattgcagagcggctatttggtatttactttacgcatttgctgcgcactcagcctgatttaaaggttcgctatatgcaaaacagctttttttccagcttggataagccttatcttgaacccgcgtttgccgagcgcaatgtgccggtcgtcatggcttccagcaatgagtacgtcccctttttgggcgtgttgctcagctcgatcattgccaatgcaagcggggaaaataactatgatattatcatattgagcaacggcatcagccccacgaaccgtcaaatattggaaatggtgctggaaaagcggccgaattttgcgctgcgctttatcgaggtcagtcagatcctcagcaatagcgacctgccctctaagcatcatatctcggtcacgacacacgcgcgttatatgttgacggagtttttgccggggtaccataaagtattgtatctggattcggatatcgttgcggatgcggatatagctgaactttaccatacggatatagaggattatatggtgggcgctgtgcgggatacggtggtggccggctggtataaaatgcctgggcatccgcagcagcagtacatggatacagtgcttaagatgcgcgatccctttaattatttcaatgcgggcgtcctgctgatgaatttaggcgccatgcgcgccagattttctgctaaagacctgctggatctggcatgtgatgacaagtggatgtggctggatcaggacgtactcaacagcgtgtgcgatggacatgtcaagtggcttgggcaggagtggaacgtaatggcccatgcggaccctaacccagccgctatgccggagagtttcgcgcctaaatggctgcaggatgcctataataaggccagaagaaatcccaagttaatacactatgccggccgcgcaacgccctgctttgcaccgcatgcggacctttactgggtcttttggaaatatgcgcgtgaaaccttcttttatgagcagttaatgggtatgattgcccaggaagtggaagcgcagcagacatacgcgcagcagcggcatgagttggaaatgaaacttaataagccggtgcgccgcggcttgcgcaggatcaaatgctgtgtgatgcctgtagtgaactgtgttttgccgctgggttctagtaggcgcgataaagtagtaaaggcctatcggcggatgcgcggcatcccggagaatggatatcagatttagttgatttgaggttcaggacaagcttcggcttgaaaaaataagtattgatcgtatgaagaaaggaaaaaactatgaaagtcgttattttagccggcgggttcggtacgcgcatctcggaagaaagccatttgaagcccaagccgatgatcgagatcggtgggcagcccatcttgtggcatatcatgaaaagctattcccactacgggttcaacgagtttgtgatctgctgcgggtacaaggcgcaggtaattaaagagtatttcgccaactattacctgcaccgctcggatatcacttacgattttgccgataataacaagatcattatccacaacaacgtggccgagccctggaaggtatcggtgatcgacactgggctgaacaccatgacgggcggccgcgtcaagcgcgtgcgggattatatcggcgatgagacctttatgctgacctatggtgacggggtgtgcgatattgatatcgccgcgctgtacgatttccataaaaagcatggcaagctggctacgatgacggctatccagcccggcggtcgttttggcacgctggagatcaacaatcagggtatggtagagcgttttgccgaaaagcggaaagaggacggcggctggatcaacggcggctacatggtgctcgagccgcaggtgatcgactatatcgacggggatgcgaccatgtttgagcgcgagccgctggagcgtttgggtgcggacggtcagttgatggcctatcagtatgacgggttctggcagtgcatggataccctgcgcgaaaaactgtatttggaagaattgctggaaaagggcaccgcgccctggaaagtgtgggataagtagatgctggatctggaattttaccggggtaaaaaggtgtttatcaccggacatacaggctttaagggcagctggatgtgccaggtattgtatttggccggcgcgcaggtgaccggctattcgctggaagcgcccacacagcccagcctctttgaggcggcgggcatcgcgcaaaagatcgattctgtcatcggggatgtgcgggatcttgaccacttgaaagaggcgatggacaaggcccagcccgagatcgtgatccatatggcggcccagcccatcgtgcgggagagctatgtcaaccccgtatatacttatgagaccaatgtgatgggtaccgtcaacctgctggaggccgtgcggcagtgcccctcggtcaaaagcgtggtcaacgtgaccacggataaggtctatctgaacaatgaatgggtttggggctaccgggagaacgatgtgctggacggctatgacccctattccaattccaaaagctgttcggaactggtgaccagctcctataaaaaggcgttctttagtgggatggatgtggcggtctccacctgccgggcgggtaacgtgatcggcgggggtgattttgctaaggatcgcatcattcccgattgcatccgcgccatggaaaagggcgaggacatcgtcgtgcgcaatccctactcgacccggccttaccagcatgtgttagagccggtgtgtgcgtacctgatggtagcccagcggcagtatgaggagcgcgcagcgcatgaggggagctataatgttggcccggacgattgcgactgcgtgaccaccggcgaattggcggatctgttctgcagcgcttggggcgatggcgccaaatggatcaacctttccgagagcaacgcgccgcacgaggcggggctgctcaagctggactgtgcgaagatcaaacggacctttggctggcagccgcgctggcacatcgccgatgccatcgagatgacggtggcctttagcaaggtatacatggccggcggcgatgtggcccaggaaatgaagcgccagattgaggcatatctggcttagtggccgggaggtactataaacgtgaagacagtccttgtgacgggcgccaacggttttttagggagccacctggtgcgatctctggtagagcatggcgtagcggtgaccgcgctggaccgggcagggtgctgcggcaacctgccgcaggatccgctggtgacgtttttgccctgcgagctgagcggcattgcggccctggatacgacgaatataccccggccggatgtgttttatcatctggcctggcagggcgtttcgccagatgcgcgggaagatttcgagctgcaaaaggctaatatcgactatagtctggactgcgtccggttggcggcgcagctaaatgcggggcggatcatccttcccgggtcgacgatggagtacctctataacgaggcgcccattggcccgcatagcctgcctacgccgcagaacgcctatggcgcggcaaaagtggcggcgcgctatttgtgcggcgaactggcctcaagcctgggcttgccgatggtctacatggtctttaccggaatctacggcgtagggcgggaggataaaaacgtccttttctataccatcgattccctgctgcgcgggcagcgcccatctgtaactaggctggagcagcgctgggattttgtacagattgacgatgcggtatcagcgctgatcgcgggcggagaaaaggggaaagccggcgctttttatgcggtgggcaatggcgataaccgcccgttggcggagtttctctatatcgtgcgggatttgatcgatcctgcgctgccgctgggcgtgggggatgtgccttataaagacagccggctgcctaattcggctatcgatacaacggcgctgcaagcggatacgggctttacctgccaggttccttttcgcgaggggatcgcggcggtcatcgcgcattaccgcgcgaaattaaacggcgaaggtggaacgaaaaatggttgatgccattgtggtaggcgcggggctatgcggagcggtgacggcgcgctttatcgcggaggaattggataaaaaagtgctggttctcgagcggcgggagcatatcgcaggcaatatttacgattatgtggacgatagcggcatcctggtgcagcgctacgggccgcacatcttccatacccgcaaaaaagaggtgtttgattacctgcagcgctttgccgaatggaaacctttccatttgcggtgcatggtgcagatggatggacgctatacgccttcgccctttaacttcaagacgatcgacgactttttccccggggaggagggggagcgcatcaagcagcatctggccatggaatatccgggacgggaccgggccaccatcgtggagatgctcgagagccaagacccggtggtcaaggcctatgcggacttcctctttgccaaggattacagcctttatacagccaaacagtgggggatcgatccttcgcagatcgatatcagcgtgctcaaacgcgtgccggtgcttttctcctatgaggacggatatttttccgatccctaccaggccatgccggaggggggatttaccggcgtggtagcgcgcatgctggaccatcccaatattacggtacagcttcatacggatgcgacagaaaagctgacctttactgcggacggcggcgaattgctttatgagggcgccgctccggggcttgtggtctataccggcccgctggatgaactatacggccagcgctttggcgcactgccctatcgctcactgcgctttgagtggcagacccatgctgtggacagctaccaggcggcaccggtagtggcctatccgcaggcgccgggctatacccgtattacggagtataagaagctgcccgagcaggatgttcagggggtcagcaccatcgcggtggaatatccgctgacctatacgaaggataacggcgcggagccctattacccgattccaaccgaagaatcggccaaaagctacgctgcgtatagagctaaggctgatagcgtcaagaatatggtgttgtgcggccggctggcggaataccgctattacaatatggacgatgcgttggcgcgtgcgctggaagtttgcaaacagattcgtgcgcactttggcgcatagtttttggatgaaaggaccgaacgctgcatgcggcgctcggtccattgtttatttgacataaatggaaaggaaaacagcagatgaagcgggtcttgcttgcgggagaaaataaatgtactttttgcggcgcgtgccgcaatgcctgtcccaccgatgcgatcctgccggtccatgtggaaggtcagggcccggctgccgggatcgatgaggagcggtgcatcaactgcgggcgctgccgggcggtctgtccgcagctcaaggcgcgtctgccccagcgggcaacggagccgccctgctatgcggcaatggcgcaggacgatgtgcggatgcaaagctcctcgggcggcatctttgccctggccgcgcaggagatatggcgcttaggcggaggcgtatgcggcgcagtatatggggaggattttttagcggagcatatcctcagtactgatccggccgatttgccgcgtttgcagcgcagcaaatacatgcgcagcgagatgggactgacctttcgcgacgtgcgcgaatgcctggagcgcggtaagcccgtgctctttgtgggctgcccctgccaggtcgccggcctgtacgccttcttgggcggtgaccgtcaggggttgaccactatcgatctgctttgccattacgcgccggatccccaggtgttcaagcgctatttaaaggatactttcggggagagcgcgattttatcctatcaattccgcgataaaaagaatacaggatggaattgcgtgaccgctgtagccatgctgaaagatggaggggagatcaagcgcgatctgtctaacgatgcgtaccagcagggctaccatgcaaggctcttcatgccgcaggtgtgcgaggaatgtttgtattccgcgctgccgcgcaccggagatatgacgattggcgatttctggtatgtggaccgggtcgatcccgagctggacgaccagaaagggaccagtatggtgctggtcaactcagaaaagggcgcacaattatttgaaaccattgcgcccaagctcaagaccctgcgccagctgcccacaaagctgctggagaccaaccgtccctttcactctcaggcgcatcctgcgcgggagcggtttttcaatttgctggaaaccgagaaattcgatactgctgtacaaaaggccctacaggggcggtttgatatcggccttataggcatttggagcgagcggaattacggctcagaattgacctattgggcgctgtatcacgtgctgcaggacctggggaaggatgtattgatgatcgagcggcccaaaacagccgcctggggcggtgaggatgctccgcatttatttgcgcacaatccctaccccgcctacgctactgtgcggccggagaacaagctgcagatgcgtaaactaaacgggcagtgtgatacggtgatggtgggctctgaccagatctggcatccggagctggacgctccctttggcgagatattttatctggatatgattcataccgataaacgcaagatcgcttacgcggcctcctttggacgggaatactggcagggcagcccggagcagcgacgcaagatagcctatctgctctcccggtttagcgcggtttccgtccgggaaaagagcggccggacgctatgcgccgacttgttcggtgtgcaggcggaatgggtgctcgaccccctgtttctgtgtgacagtaagcacattagcgcgctggcccatcaggggaaactggatgtggacgaggggacgctgggagcctacttgctggatctggatgagaaaaaagtgcgggcgctctcctttgcggccgaaaaaatggcgctcaagcccagcattgtgaccgatgcgtttaaaggcgagagggctgcccggcagcatcccggcgtgcatgtgggcgccaggatggaggactgggtgcagaattttgctcagagccgttttgtgataacggattccttccacgggacttgtatggcgatccttttccataaaccctttatcgccatcgtcaaccaagggcgcggggcgacgcgcttttactccctgctggagcaactaggcttaggcgcgcgcctgatcgaaaccccggaggagctttatggcagaggcgatctgctgcatgacattgattttactaaagccgatcaggtgctggaagagtggcgtgagcgttcgctgcagtggcttaaagcggcgttggaagcgccggaagagcggctcccacagggcgtggatctgttaggagatgaggttgccgggctggatgcgcgcttaagcgagctttgggggcatgtcgagcggcacgaggaggcggtagtctaccacgggaaagccatacagcattttgaagggcagattcaggggcaagaggaacgattagctaagttgaagcaggaccatgatgctatgcaagagcgcatgactcaggatttagcgctgagattagagcgtcttgaaggcgatatcagcggccgctttgaggctttagagcaatatgcccgtacgttgcaggagcagctaaatgtgattcgctcatcggcgccctaccgcgtggccagagccgtttgcgcgctgccaaataagataaagcggaagctgaagcgtaaatagggcgtgccggtttgtaatactgtttcagctgtaacgcgtgataaaccaggcgctggtgaatataggattgagggagacactatccatgagcgaagaaaccatagaacagcgtattgtccgcttgcaaaaagagctggaacaaaaagacattgcgtcccagaagaacaggaaacagcgaaaactgctgacattggccttgtcttgcctgctgctgtcctttacgctgtgcgtttacggccccttggatttgttcctggggaatataggggagctgtggttttcgcttttccagatatggtggattattctgctcacagggttggccgcctttgggttaacctttggttttgggtacttactgcgtggtaaagtaaggggtatatatacaagccttgttttcggcgcaggtctggctttttggctgcaaggtaattttctcaatttagatcttggaatatttaatggtcagaatattcaatgggaactgttcagaaagcacgaactcattaatcttggaatctggggcttatgtttagcactgcccgtagcgctatatttatggcgccataaaatatggcaaaatgctgtaagggttttagctgccagcttggcggctattcaaggtattacgctgggtattttgctgttcacaaccgatggtgcgtttgcacataaagatgtggatttgtttttgactgataaagctatttgcgaagttggccaacaggataatgtgatcgtctttttgctggatatgtttgatgaagactattatcgcataattgcaaaagaagatccgcatgtcctttccggttttgaggggttcacgcatttttcaaattcagtgggtaaattttccaccacgaactacgcgatcccgtacctgcttacccaaaggcccattattccacagcaaagttataatgattatcttcatcaagcctatggggaaacccagttttttcgtgatttgaaagaggccggatatcagatcgatctctatacttctgaagcttatgtgcccgaaaccatgctgggcacggtccataatctgacgcaggacaggctggttcccacatcgaactggatcatgtttaaaaagctttaccgctttacagcgtcaaaatatctcccgcatacattgaagaaatacgtatggtttcaagaggatgagtttcagaaaatccgcagcgttgaaagcggggacgctgcctatactacagagaataacaattcagagttttatcagatgttgacgaacaacgcaatccaggcggggggcagcgcaaaacagatgaaatttatccatctccatggtgcgcactacccgtacaaaattaatgaacaggcgcagccgctgggggcggataacgttatcgacacggctaagggcgttttaaaaatagtatccgattatatggcgcagttgaaggagctgggcctttatgacgatgcaacaatccttatactggcagatcatggctattatgacggtacggtcaccaatccgatatttatggttaagcggccgggggatacggggccggtaaaggatgcgttcaatcccatatcgcacgataattttcaagctacggtcatggatgcaattggtttgaataaggatggacgatacggtgtatctgcctttgatacgaatattgtgggtcagcctcagcgcatattttatcgttatacgttaaatgatgcaagcgctaaggacgaagcctacacgggaagaaaaccgtacgactgtattgagctgctctttccagatgaaagcaacgatgccagctgtgtcattcccacaggcaggctgttccctgaaacgggtggcgaacaaagcctatcacgctataagagctatgcgctgggcatgcaactgcgttatgatgagaatgggttggatgagcaatgtatatttgactatggcgttatcaaaaaaggcttggatgaagtctatctgggaacaaaacaggcccaaatttcaatgacgattgaaggtgaaatttcagatgagcgagcgttaaaatgtgagattggctatggaaaggtgacaaacggttctcagcgcattgcaatctatgcaggggaaggagcgggaaagaaggttttctcgcaaacgattacacaggaaaatggcgtgattgcatttgaagttccagtagaatggatcaaggcggataaaaagcttgtgttgcggatcgaaatgccggatgcttatccagagggttgggaacaggatcatgcccaaggcgaatatacggccttatctttaaaaagcttcggattattgtaactggaaagatatcgcttcttgcatttgcgaggcggctgtactatactaaatgtgttttgtcgcaaagtgtcggtttggcgcttgcgtaagcagattattgtttgagaagggatagtgggcgatggatattatcaacacggtagtaggtatcccgcttggatacttgatgtggctgtgttacgtgctcatccgcaattatggacttgcaattttggcctttacgctgctgacgaaagtgattttatttccgctcaacatctgggtgcagaagaactcgatcaagatggtgcgcatccagccggagctcaatgagattggcgcgcgctttgtaggggataagaataagattgccgaagagcagctggcgctttacaagcgtgaaaactaccatcccctggctggcatgatccccatgctgatccaggtgccgatcatcctcgggctgatcatggtggtatataatccgctgcagcatctgttgcacctggatacggagctgatcaacgcctttgtcaaccaggcggcggccctgctgccgggagtggacctgggttctaccgcgcagctaaaggtgattgagctgatcaacgatccaagctttgtaggcttcttctccggccttcaggtgccgggagtggatgtcgccggcgccatcagtcagatccagggcatgcgtctggagttcctgggcctgaacctgtcgctgctgccggatattacgcggctggacggctattttctcatcccggtactcagcggcgtcagcgcgtttttgctgtgctttttccaaaacaaggaaaacgtgctccagcgcgagcagggcttcctgggccggtggggcatggctgtgttccttacggcgttttccacctacttcgcctttatcgtgccggtaggcgtagggctttactggatcgcgggcaacgtatttgcgatctttaccctgtacctgctcaactggatgtatgaccccaaaaagttcatcgattatgatgcgctggaggagagcaaagtccacctggcggaaagcaagaagattgaggcgcagctcaaaccatccaaggagcaaaaggccaaggctaaggcggattatgcccgcttttttgaaggcaaaaaagtaaagcagctgctgatctactcggaaaagagcggcttttataagtactttgaaaatatgatcgacgtgctgctggcccagagcgatattaccatccattacctgactagcgacccgaacgacgcgatctttaagatggacaacccacggctcgtgccttattatgtagatgataaccgactgatcccgctgttcatgaagatcgacgcggatgtggtggtgatgaccacgccgaacctgcagacctatcacctcaagcgctcgtatgtgcgcaaggatgtagagtatatctatatccctcacgatccgctcagcacgcacatgggtgtgccaaagggcgcgtttgactattttgatacggtactttgcgttggtccccagcagatggcggagatacgggaaaccgaaaaagtttacgggctgccggagaaaaaactggtgccctgcggatacggattgttggacaacctgtgcgccgcttatgaggccatggagaagaccgagaatccggtgaagaagatcctgatcgccccttcctggcaggatggcaatatcctggatagctgcattgacgagatgctggccgcgttgctggataagggatatgatattaccgtgcgcccgcacccggaatatgtaaagcgctttgcggtaaagatgcagcagttgatcaatcgttatgaggatcgctttggcgaagatttccgcattgaaacggatttttcctccaatgtgaccatttttacggcggacctggtgattaccgactggtcgggcatcgcccatgagttcagttatgccactaagcgccccggcctgttcgtcaatacgccgatgaaggtgctcaatcccgaacacgataagatcaaaatcgtgccgttggagctggcgctgcgcaccgagctggggaccacgatcgatccggacaagatggatggagtagccgcggtggttgccgagctgctggacaagcgtgaggattacgcccagcatatcgctgaggtgctggatcaaaatgtgttcaacctggggcacagcggcgaggctacggcgcattatgtcatggatgcggtggccgccaaggcggattcctcctatcgaaaaatgatggaaatgcaataaattagagaatatttggaggtctatgatgaaaaagaggattgccaaacagctgttttgtttcacctatttctttggatttaccacgttgctgctctcccgtacggcctttgcctacctcgacccggcaacgaccagctacctgattcaggtggtggcgggcgtgttcatcgccggtggtgtagcggtaggtatcttttggaagaagatctccttcttctttaaaaagcgcaagatgcaggcgctggagaaaaagctgacccgtgaagcggctaaacgcgagcagggaaaatagggcaaagcgtatcatagcgccggcatttagccggcgctttttcattgagactagacctttagataccttgcgtataagtcgatacgtggggatagggttctatggtagaataataaagtattggccctagagtagggcggaaaggatacagggctatgattgaagtggcggctggcatcatccgcagggcggataaactgctgatctgccagcgcggggcggatggcgattgcgcgaatctatgggagttccctggtggaaaaagggaggcgggcgaatcctttgcccagtgcctggagagggagtgccgggaagagctgggcatacgggtgcgcgcggtgcggccggtagcagaaacggtttatacctacccggagcgaaccgtccatctttccttttgggaggcgcagtggctggaaggaaccttggaaaaacgcgtccatgcgcagatggtatgggttgcgcctggcgagctaggcaactatgctttttgcccggccgaccaagatatcgttttacagttgcaaaagggataatgttgcaattattttgtaatacgtttgtcatattaaactcatataactgtaggctataagaagcaaagagtttgggatataatggcattaaaggaagtttacagtaaaagagtggaagtgtttaccagtgaaagaagatattaaaaaatttaagattccgatttcgccggaaacgacgaccaagagcattcgattccccaatgatctgcttggtcaggtggaaacgttgcttagcggaaaaaactgttcttttacggcttttgtggtagaggccgtgcgcgtggcgatgacgatgctggatgaagatgaagtggcatcagcctcaggtgatgcaaaaaagcaggaggaggcccagcacaaaaaacggggccggccggctaaaaaagctgcggagagaatctagcatttccacaagcctgtgagaattgacaggccagtattctttttgtatactaggcatatcagggcgtttccccgtatgagggcaggcgaacataagggtattaggcggccgtagcggccgcttttttattcagacagcgtgcggacaggagccggcgctgatgccagaaggctgcgtgattcgtgtgcctttttttattgcacgcgaaagagaatgctaaggccgggtgagccgcttgaataacgccagtcaagttggtattgctgttttctgtgtattacgaatatggcagtatcgcttaatcagtggaaggatggctgaaccccacaaatgcaaaggagagagatacgatgaagacattgtacttggaatgcaatatgggcgcctcgggcgatatgctgatgggagccctatatgagttgttgccggacggtaatgcttttctggagcagctgaatgcgctgggccttcccggcgtaagggtagcccgggaggagagcgtcaagtgcggtatccatggtacgcacatggcagttacgattgggggacaggaggaattgagcctggatgcgcacgaacatgcccacgaagtgcatcatcctgcagagcaagccgcgcatgggcaggaaaaccatattcatgcccatgagcacgaacatgagcatgggcacagccatgaacatgcccacgagcacgaacatgagcatggacacagccatgagcatacccacagcagcgtggcggacattgcgcatcagatcagccatttgccagtatctcagcgcgtcaaacaggatgcgctggcggtctatgggctgatcgctcaggcagaggcgcacgcgcacggcgcgccggtggagcagattcacttccacgaggtgggcacggtggatgcgctggcggatatcgtgggcgtttgtctggcgatggagatgctctcgcccgataaaattgtggcctcgcccatcaatctgggcagtgggcaggtccattgcgcccatgggatcctaccggtccccgcgccggcgacagcacatatcctgatggggctgccggtttacggcagcgcgatccgcggcgagctttgcacccctacgggcgcggcgctgctgcgctattttgccactgagtttgggcctatgccgggcatgcggatgatggctgtaggttatggcatgggaaataaggatttccccgctgccaactgcgtgcgcgctgtatggggcgaataaagggacgctgcctgcaggtaaggagtaggagcatatgttttccggggctgttctgaaagatcgggaaatgctgcggcggattggcaacctggccggtcctgctgtagtggaacaggcgctgcaaactgccgtgcagtatgccgataccgccatggtggggcagatcggcgcggcggcttcggccgcggtggggctgacgatgagctgcacctggctggtcaacggcccgctgtttgccatggggataggcgtactggcctgtattgcccaggcgttgggcgcaggcgaagtaacgcgcgcccgaaaggccggcgcgcagggcgtctttctggtactgttcttaggcatattgatgggggtgctgacggttgcgttggcaccctttattccatattggctggggacggaggcagcgcttgccaaggatgcgggcgattattttgccatcacctgcctgccgatgatatttcgcgccggcaatatcgtatttgcatccgctttgcggggcgcgggggattccaggcgcccgatgctgatcaatttggcgatgaatgtatgcaatgtgctgctcaattatctgctgattaacccggcgcatttgctggatattggatttgttgtgcttcccctttggggcgcggggatgggcgtgcgaggcgcggccgttgccacggctctgtcccacgtgctgggcgggacgctgatggcctgggcctattggcggcatcccaccctctcgcccaggcagtgcggggtgcgcgtggacagaacgctgatgcgcaggattatttctatcggcctgccggtaactggggagcgcgtggccgcttgccttgggcaggtagtctttaccgggctggtcagccgcttgggtaccctggcactggccgcccactccatagccctcaccgccgagcaggctttttatatcccgggctacggtatgcaggcggccgcctccacgctggcgggcaacgcgctgggcgagggcaatgaaaagaagctgcgggacacttctttgaccatcacctttatcgctgctgccttgatggccttgatgggcgcggcgctcttctcttttccagaagctttaatggggatctttaccggggaccgggaggtgatggccttgggcgcctcggtactgcgcatcgttgccgtgtccgagcctctgttcgccgtagcgatcataatggagggcgtatgcaacggcatcggcgatacacgggcgagctttatgatttcggccggcacgatgtggggcgtgcgcatcgcagggacgctgatatgcgtttacgtctttcatggagggttgcaggcggtttggtgctgtatggtggcggataatacctgcaggtgctgccttttgctgctgcgctttttgcggggcaggtggaaaagacaattagcggttggttgatggggtgttcaaagttatcgagtaaatgtattaattggatgtaaataagttgataaataataaatataggggtttaaaagttcattttatatgatataatttataaaaatgaaaatatgaggggcgtataaaatgaacaaaaaatggttgggactttttctgtgcattgcaatgttggttccaatgtggggatgtgcgaatcaggaagacaataaagtggtgatctattccagcgcggaggaatatcgcaacgaatttttacagcaggagttgaacaaaaaatttccggattatgagatcaccatcgagtacatgaccactgggaaccaggcggctaaattgctagccgaaggcacaggtgctgcttgtgatatcacctatgacctggaatacggttatgtggataagctgcgcggcgtactggccgacctgtccacctacgacatgagccaatatgttgacgacctggtggataacggaaaaaatgtgttaccggaagctcgaaatggcggctgcatcgccatcaaccgtaaaatgttggaggataaggggttaccgataccggaatcgtatcaagatctgctcaagccagaatataaaggccttatctcgatgccgaatccgaaatcatccggaacaggatatatgtttttaaagagtctagtcaatgcctggggtgaagaagaagccttcgaatattttaaagaattaacccccaatgtgctggcatacacctcctcgggttccgggccggtcaatgccctggtgcagggggaggcggctatcgggttggcgatgacggcccagaccgtgactgagatcaacaacggcgcagaccttgagatcctctttttcgaagaaggctccccctattcgctttacggaaccagcatgatcaaaggaaaagagcagcgggcttgcgtaaaagaggtgtttgattatttagtcaataccttgcttccgcaggataaagaaaaatttttcccggagaagatttacaaagacagggactttagcattacgaattatcctaccgatatccagtatgcggatatgagcaataataccgcgcaggagaaagaacggctgctggctaagtgggaatattagtatcctaaacgcttgccgggaaaggcgtaaggcgaaattcgacgtgtaaataaagtgtaaaaactcgcagggggtatgccgctatccttgttgacgttcattttgtatgctataatctcgaattagaacgttagcgaaaggggtatagcagatgaagaagcgattggccgcatgcctgttggcgcttgcgatggcgctttccatggcgggttgcgccggaggcggtgcggataataaggtagtcatctattccagcgcggaggaataccgcaacgaatttttgcagcaggagttgaacaagcagtttccggattatcagatcaccatcgaatacatgaccagcggaaaccaggccgccaagctgttggcggagggtacgggttctgcgtgcgatatctcctatgacctggaatatggttatgtggacaagctgcgcggcgttttggccgacctttcgagctatgataccacgcagtttttagacgagttggtagatccgggcatgaacgtgctgcctgagctgcgcaacggcggctgcattgccatcaaccgtaaattgcttgcggataagggtgtggcggtgccgacctcttatcaggatctgctcaagcccgaatacaagggattaatttctatgcccaatccgaaatcttcgggcacggggtatatgttccttaagagcttggtcaacgcatggggtgaggaagaagcctttgagtacttcaaagagctgacccccaacgtgttggcatatacttcctccggctccggaccggttaacgccctggtacagggagaggcggctatcggcttggcgatgacggcccagaccgtgaccgagatcaacaacggcgcggatcttgagattctgtattttgaagagggctcgccttattccagttatggaatggctatggtcaagggcaaagaacagcgcgagagcgtaaagacagtatttgattatctgctcaatacgttggtgcccatggaaaaggagaaattcttcccggagaagatttacaaggataaggattttaccatcacgaactatcctacggatatccagtatgccgatatgtcgaacgatacggcggcggagaaagagcggctgctggccaagtggcagtattagagaggccgcttgacggcagtgaaacatttgaaacggggcgaagaaggttcgccccgttttgttatgcgtttaataccctgacaatgaatgtgaacatggtaaaatggcgaaatctgtaaaaataatgttaaaacgcgggtaaatggaaggaaacgccgcttgtatatgttcattttatgtgctataatcctgcattgtaacagtatgggtcaatgggaaaaacagcaggcaatagggcttgcatgctcatcatatcttgcagaaaaaagctgcccgcgaatactgggtcaataacgggcagcgttataggagtaatgcaaatggcgaaggacaaactgattatcgaagggctggaaaaggcctttgggacaaacgaggtgctaaaaggcatcaattttaacgtggttgacggcgagtttctgtcgatcctcggcccatccggctgcgggaagaccacgattttgcgcatcctgatcggccttgaaaaggcgagcaaaggacgcatattaaaagacggaaaggatattacgaacctcagcccggccaagcgggggatgggcatcgtctttcaaaactatgcgcttttcgagaatatgacggtgctgggcaatgtggaatacgccctgcgcattaacccggagcgcaaggctaccgcgcgggaaacggcgctgcgcttgatcgagcaggtaggcctgagcgagcatatggataagcgcccgggcaagctctcgggcgggcagcagcagcgcgtggccatcgcccgcacgctggcgctcaatcccgatatcattctgtttgacgagcccatgagcgccctggatgtggatacccgcctttcgctgcgtcaggagcttaagagcatccagaagcagttcggctctaccatgatctacatcacccatgaccaggaagaggcctttgccatgagcgaccgcatcatggtcatgcgtgagggcacgatccagcagctggatacccccgcgggcatcgtcgatcatccggccaacgagtatgtagagcgctttgtgctgcataacatccagctcaaaattgattcgctcatccaatatgcgagggtgcaaaatgaaaagtaaaagcaaggcgatgtcaggcgttaagctgctgctgatcgtcttttttgcggtggctgtgctttttccgctgatccgcatgttcttttccatggcgggcacggatatcggcgcaattctgacatcggacaattttaatacggcgctgctcaattccctaagcgtaacgctgacctccacggtgatctcggtggggctggccacagcgctggcctggtgcattgcccgtaccggggtgcgcctcaagggcgtatggagctttttgttcgtgctgccgatgctcatcccctctatctcgcacggaatggggctgatcgtgctgttcggtgccaacggggtgttgaccaacctgctgggcctgggcggatcgatctatgggttctggggcgtggtcgtagggtcggtcatgtattccttcccggtggcgtttttgatggtggcggatatcttccgctatgaggacagcacgccctacgaggcagccaatgtattgggcatctctaaagtgcgccagtttacggccattaccctgccgtacctgcgccggcccatgatctcggtgatctttgcggtcttcacgctgatcattactgattatggcgtgccgctgatggtgggcggccagtttactaccttaccggtgatgatgtatcaggacgtgatcggcctgcttgactttggcaagggcagcgtgattggcctggtattgctggtgccggctttcatcgcctttgtactggatctgatcaatcaggataagggaaacagcggttttgtggtacggccctttaccattgccaaaaaccggctgcgcgatggcgtggcttacctgctttgcgcggtggtatcggtttgcgtggtgctgcccatcgtatcgtttgcgctgctcacctttgtgaagaagtatcccatcgatatgtcggtgacaatgaataacatcgcccgggccatggatatgaacgcgggccagtttttgatcaactcgatcctgatcgccatcggcgtatcggtcgtcggcgttgtagtggcctatgccacaagctatcttacagcgcgcacccactctccccagagccgggtgctgcacctgatgagcgtgatcaccctggccataccgggcctggtgctgggcctttcctatgtgttgttctttaagggaacaatgatctatggtacgctggctattttgatcctggttaacctgatgcactttttcgcctcgccgtacctgatgatgtacaataccttcggcaagctcaacggcaacctggaggcggtggggcagaccctggggattagccggatgcgcatcattctcaacgtattggtgccgcagtccaaatctaccatagcggagatgttctcctatttctttgtcaactccatgatgaccatttcggcggtatccttcctctcggtacaggctactcagccggtatcgctgatgatcaccatgtttgaggcacagatgatgctggagtgcgccgcgtttgtttcgatcttgatcctgacgatcaacgtgctgctcaagggcggtatcgccctttataagcgtaaaatcagtaaagaggttgtggcataaatgagcttaacaaaaaatcagtttgatattttagcttgcctggagcaggaaaaaggcgcgagcttgacccagcgcgagttggtgagccgggtaaataagtccctgggtacggtaaataagaccgtgacggaactggggaagatgggctatgtggaaaagcggggcattaccgaggcgggcatcaaggcgctggaaccctaccgcgtcaagcgggcggtatttatcgcggcgggctttggctcgcggctggtgcctatcaccctgaatacccccaagcccttggtgcgggtcaacggcgtgcggatcatcgacacgttattggacgctgccgtagcggcggagatcgaggagatctatgtggtgcgcggatacttggccgagcagttcgaccagctattgtacaagtaccccaatatcaagtttatcgaaaatccggcttataacgaggccaataatatttcctcggccatgtgcgcgcgctaccatatcggcggcgcatatgtctgcgaggcggacctactgctttataaccccaagctgatctgcaaataccagtatagctctaactacctggccgtgccggtggaaaaaacggacgactggtgctttacgacctctggcggggtgattaaggagctgcgcatcggcggggtgaattgccaccacatgtttggcatctcctactggacggagtacgacggagcgcggttggctgaacacattaaaaaggtatatgaaatgcccggcggaaaagagcgctattgggatcaggtggctctcgagtattacgcaaaagagtataatatcagtgtaagggagtgcacttttgaggatctgtgcgagatcgatacctatcgggaactgaagcggctggatcctacctatggtgaggcataatccccggggcaggccgtaaagtcgatatttagcctccaatcttttatgaattggaggctttttgtttacatgtccgctttataataaaagagaattagccgttttcggacaaaacccgcggatgaatggccttttgtacacatataatggtgcggaggaacctgagattgacagcggtttgtataaagggctataataaaatggttattaggacaaaatccgacaaaatagattcggcccaagagaggacgccgggcgcgaggggcggacgccgccctagtggtaaacagtgttagaggtgaagagatgaatccgtataatcagcattaccgcacgagaaaaaagcgcagagtcaataaaaagcgctttttaccctttttgatcgccgttatcattttgggcggtgcggcgacggtcagcctggcggctgctatccgcaatatcagcggagcagtgaccgctaacggcgacgcggtgcaaagtgccgcagctgtgctggaccagcagcccgaggagacgcctatgcctcctgaggctgcgcctacccctgtggctacgcctacgcccgcgcctacccctgcgcccacgaacctggtggattatacgggccccatcgagcacgtgttcgtccacccgctggtggtctaccccgagctggcctttgatggggacgcccaatccaagggcatggatgattatatgacgacggtggatgagttccgaaccatgctggaagaactgtatgccaacgactatgtgctgatgaacgtggataagatgtatggcgaaaagaccgatgaaaatgggaatacgacctacggacggctgaagttccagctgccggagggtaaaaagccggtcattatctccacagacgatatgaactattaccagtatatgcgcgaaaacggctgcaactggaaaatggtggtgggggaggacggccacatcgccgagatgagcgtggatcccaagaccggccaggaagtggtgacccagggcaacgaggtattctctatcatcaatcagtttttagaggagcatccggacttttcctttgatggttccaaagccatcgtaggtctgactgggtacgacgggatattgggctaccgcaccaaccgcgaatccgaaaatcgggagagcgagattgaggcggttaagccggtgatcgagtgcttgaagaatgacgggttccagtttgcctcccacagctacgcccacgcgcatatgtctaaatgggatgcagctaaggtgcgggaagattgccagaagtggaaggatgaggtggaatccctcattgggaaaacccatatttacctgttcccctatggcgagtatcccaaacagggcagcgatgcgtataatgtttttttggagttcgggttcgactacttctcgggtgtgggtctgaacacctatcaaaaggtgtatgagaagggctacacctttgacgaccggaagaatatcgatggaatgaccatgcgcagctgcctgaaagaagggcccaacgggaagaaagataacggccagcctacgacccgcgcacaggtttgggcgatgatggacgtcaataaagtgtttaatcaatccgcacgcggctctgagccgggtaagggcatcggcgtaaagtaacaaatagggtatgacatgaaaaaggccttccgaagcttcggaaggccttttatattgcgcttttcagggtgcaagccgtgccgcctcccacagcgaggcaactggacgcccgcgagaaggggtgaagccgatgccgtaaaagtccagcgaaaaggcggcggccagtccctcgtccctggtggagtctcccacgacgatggaggcggaaagcgcgatctgcgggtacatctgcagggcctggtggatcaggccgggcgccggtttgcagcaggcacagcccgcgccgcgcgcgtgggggcagtagaagatgtccggtaccgcaagcccctgcaggcgcagcgcctgctcaaaacgccgggaaaatgtgctgtactgttcgaaagaaagcagcccttcgccgatgagatattgattggtcaccacgattatatgataacctttgcgccgcaaaagtttcagcgcatcgatcgcaccgggcagaaacgcaggataggagacggaggcccaaagcgcatccggataatcccggataatggttccgtcacgatccagaaaggcggccttcatcgaggacctcctgctgccaggcccgtgagaaaacgcgcacgcgccaggtcttttcggcgcacataaacccggtactggtagtaatgcgccaaatcctgtccgcaggcgctgcgctgcccgccgggaccggacccttccggtataaaggcggcggcgtcgcggctgcggcagatcacctggtactcgatcccgttttgggccaggataccggtgatgcgcgcctgttcgggcatagagcgggtaagatatagttcgacacgattaaaagcgttcacttttgagcgctccttttcctataaccggggcaaaatggtctgccagacagcatccagcacaggttggttttcattatgcgcgttgatggcgataacggcgtccttttcgggcaacacgatgctgtattgggcaaaggcgccgtccgcccggtagccgcctacggtattcatccaaaactggtagccgtagcccacgtggttatccgcgcccccaccaaaggatgcggtatcgatctggcgggaggtggcttggtcgatccagtcctcgggaatcagacgctgtcccttccatacgcccttttgcagcagcagctggccaaagcgcagtacctcatccgtgcgcagccaaagtccccagccgccggcggttatccccaaggggcactcgtcccagcgcggggcgcccatgcccatgggctcaaacaggcgggggatgagataatcccgggttttctgcccggtaatattttggatgatggcggagagaatataggtgcagccgctatcgtatacaaagcgctcgcccggttccagatcttgtgcgacggagaaataataccgcacccaatcgctggtggtaagcgccctgcgctggggtgagagcatcagcgaggtgctgtggccgggcgccatggtcaacaggtggcgcaccgtcaaagcctgtagacggggcgagatcacctccggcagcttctcccgcgggaaaaaagagatggccgcgtcatccaggcgcagcttgcccgcttccaccaataaaccgatggccatggcggtaaagctcttgctcagcgagtgcagctcatagggcacgtctggcgcccagcggtattcttccagcttttctccgtgctgcatcacggcggcgccgtgcagggtcagcccctgcgtagctacctgcgcgacaaattcttccaacatatcggtatttccccctttgcagatcgtttttttacaccactattataacacaaaggcggcgggccattgggcccgccgccttaaaacacaacagaatctctggcgttattctacgtaaccggtctccttcatgatggcgtaagcggtgcgcacgctctcctccgtggacaggtggtagagcatatcctgctcgatcaccgcgtattttaccccggcatccacgcccgcatggaagcaggcttccaagtccaccagcccggtacccggggtggtgtaacgggggacaatgaccttgccggtgggcttattctcgcagttttcgccgcgggtatagtccttaacgtgcaggatgaccacccggtcgcccagctggcggatcagctgagccggatcccaaccggcatagtgcgcccagcccaggtctacctcaaatttcacatgctcagccttggcggcgatcatccagaacagcggcacgccattgtaggtggtgcggaattcctgatcgtgattatggaagaagaaatcgatcccttctttgcccagctccacggccagcttctccatattttcgatctccagcatggcctcgtcatattccggcaggtcaggccggtcggcaaagcgccagaaggtcgcgccgctgtggtacatgccgaccatatgcacatcggcaatgcgggcctggcgaaccagctctttaacatccggataggcgcccttgtgcaccgtggtgcccagggccagatacttcagccccatatcgtgcacccggtcgatcaccgctttgggatcgggctgggtaaacgcatagcgcgcattttcgtaataggagtaacccaatttggcatacttctggagctgctccagatagtccacgtccttgggcatgaaaccggtaacgccagctttcattttttccatgatattccctccagttgtttggattgattagtttgaaagatatgttaacaaacaaattatagcagctattggcggttctgtaaaggcggtgggaatgtgccaggtttagaagattttctgctcttcatataaaatagaccggccagcgcgaacagtgcctcggcgcagggtacggtcaaccacaccccgggcatgccccaaagggcggagagcagcagggacagggcggcgaccagtataaagctgcgccctagggagaaccaaaaggcccgcgttcccctgcccgtagaggcccaataggccgccaggatcacgttaaagcccataaagggataggcggtaaaataaaggcgcagcccctgagtggccaggttgcccaacgcggcatcctgaccggcgttaaacagggcggtaagctgggtggggaagacctgtgccagcgccgtaaacagcgcgccaaagatcagtgcggtaaccatggcgatgcggcgcgcctgcaagatagcggcgcagtcccccgcgccgtaggcacgcgagatcagcggctggataccctgtgccacgccggtaagcatagcggtagcgactaaggccaggttggcgacgataccgtaggccgccacgccgggattgcccgccagccccagaatgatgctgttaaagagcgccattaccagtgctacggacgcctcgttgaccagggagggcagcccaggggagagcaggtgtttgatctttcccaccgtcagatgcggccggcaaaggcgcagggggctttttttgcccaagcagaccggcgccagggtcaggatccccaggcagggtgcaagccccgtagcggcagcggcgccggccatcccccaacccagaggaaagagaaacagatagtccagcaggatattgctcaggctgcccactaacatcgccgccatggccaggcgggggtgtccggcattgcgcataaagcagaccagcacgttgttgagcatgaaggcgcaggaaaaggggaagagcgcgcccagataggctatccccagcggtgcgatacccgcgtctgcccccaatagtgggaggatgacaccggataatggggcgaccagcgtggccagcccgcccacgatcagggcaaggatcagcgtatgggtaaaggcggcccgggcatgatcgggttgtgcgcgcccttgggcgatggcaaagcgcgtggcgccgcccatccccaacatcagggccaggccgttgagcaggccatagagcggcagcaccaggttcagcgcggtaaggcccggcgccccaagtgcggcggagatgaaataggtatccgccaggatatagcaggataaccccagcatccccatcacgttcagcgagatatagcgggccgcggtggacaaaagtgcgttgtgttgtgtgtgcatcgtcgccctccttaaaaaacagcgtaaacaaaaataaccggccgcccatgcccgatgacctaacggcatgaacgaaccggcgttatcagccctggccacccggcggcgatccaaagctacgctgttatatagttgtgcccctcgccctttaaggggaggacgggtttattttatcaatcgtccccagacctgtcaagccccagcttcttagctttggcgcagaagatcccgtaagccagcgccacggcggcggtgggcagcgcaaagcagcacgcggataccacaacgcccgtataccagggaaagctggtggaaggatcgcccagggtggagcatacaaggtagagggcaaggcccgccatggccaataacaatagcgccagtaccgcaaggcagatgcgcctaccccttaaaatggttttaggttgcatgccggtttgctcctttccataaaacttttaaattaagctgatgctcaagggatttaagcgggcgcgagctgcgccaaagcagatcaggactgaacctaagtataacaggatcgggtgtcatttgcataatgctttcaagcgcagcgcgcatctgatataataagggggactaaaggggaaagacggaggttcatgtaatatgattgtgatcgacgaacaaaaatgtgtggggtgtggccagtgcgtggccgattgtgtatttcataacctgaccgtggcacagggcaaggcccacgtagtgcagggctgcatgcagtgcgggcactgcgtggccatctgcccggtgcaggcggtctccatacccgagtatgagatggcggatatagaaagctatgacccggagagcttccatctggaggcggataaggtgctgcacgccatcaaattccgccgcagcgtgcgccgctttcaggataagcccatcgagcgggaaaagttggagcgcctgattcaggctggccgctataccgagacggcggtcaatcaccaggcggtgcgctttatcgtggtgcaggagaagctgcagcagtttaagcctctggcctgggagggctggcacaaccatgtttgcgccctcaaggaggaggacccggagcgcgctaagggctttgaaggatatgaggaaatataccgcaaagatcctacgcgggaccggctgttttttaacgctccctgcgtgattgccgtagcttcggatgcgccgctggacggagggctggccagcgccaatatcgagatgatggcggtagcccaagggctgggcgtgttgtttgatggattcgtgctgcgggcgatcaaccacaatcccgcggcgcaggaatggctgggcctgggcgataagcagttggccgccgtcatgctggtgggctacccggcggtatcctacaagcgtaccgcgccccggcgcgcggcggatgtgctttggaaatagcgagcagatgagggggaaaccggttgaaaaagacggataagggccttagggctattcccggcgtagggataaagacgcgggaggatttgcaggcgctggggtataccacggtggaatccctgcgcggacaggatccggaaatgatttatctgcaggattgcgcacgtcggggttttatgatcgaccgctgccagctctatatataccgcgcggcggtttattacgcggataccgagcgccccgagccggaaaagctgaagtggtggtactggaaggataagccctacccgccggtggagagcgggcagccggtgcgggtgcgcacgctggataaggggctgccttataaggaactgatcatgcgggcggatgcgcccttgcgcggggaagacctgccgcccaaggggttccgctttaagacctacgcccctggggacgaggtgcactgggcgcagatcgaatcctccgtaggggaatttgataccgccaaggcggcagaggtgtattttatggagcactatgcgccaagaagcgagaaactggcccagcgcctgttttttgctctggatgcgcagggccgctatgcgggcacctgcaacgcctgggacgatggggaaaacacccgcgcgacgctgcactgggtggccgtgcggccggagtaccagggcaaggggatcgcccgggcgctggtagcgcgcgcgctttacgcctttgcccaggcgggggaagcgccggtttacctgcatacgcagacctggagccatggggcaatacgcctttaccgcaagctgggtttcgaggtggtgcgccaaccggatttttcacccaaggcctgccgggattttgaggccgccctggcagtgctgcaaaccgtgctgcccccggcggaatacgcggatctggcggcacatgtgatctaaacaaaaatatgaaataagcaaaagggggagaaaaggatgaaagtattgctgatcaacggcagcccgcgaaagaacggctgcacctttaccgcgcttagcgaggtggctggggagatcgaaaaggccggcatcgaaacggagatttttcacatcggcgctaaggctatctggggatgcacggattgcggcggctgcgagcaaaccgaccgatgcgtacaccgtgacgatggggtcaatgccatactggaccgccagggcgagatcgatgggctgatcgtgggggcaccggtgcactacgcttccgcggcgggcgcgatcaccgcgtttatggaccggctgttttacgccggcggggcgggttttgcccataagcccggggcagcggtggctacctgccggcgggcaggctctaccgcgacgctggatcagctcaacaagtattttaccatttcgcagatgccgctagtgtcctcccagtactggaacatggtgcacggcaatacgccagatgaggtgcgccaggatctggaaggcatgcagatcatgcgcacgctgggtcgcaatatggcctggctgctgcgctgtatcgaggccggaaagaccgcgggtatcccctacccggagggcgaaccccgcgcgtggacgaattttatccgctgagaacaaaaaattggcgcggacagttatatctgtctgcgccgttttttgtatactttagtactcgctacgttgtcattcggagagaggccgtaaggccgagcgaagaatctcgggcatcggcaggaaagtggcgctcgacctgggcagggcggtgcaggcgaggcagcaggacgtaagaagattcttcgctgacgctcggaatgacaatggcgcagttatccctacggttgcgtggagaagtataggataaagctgttattcagaaaagagggcggcctggggcagggataatgcttgtggcgggagagagcgtgtaaaggcgcataaagggtaggatcggttacagggcgcaagcccacggagtgaagaatcccaggcccggcgttgactgttggctacgccgaaccagctagatatggtactgtacccttgcaatgtgatgcggctgggccgggaaagtaccgtgagattcctcgcgttgcgcggaatgacaggtgcttatgacctttattgcagtaaaggcatgtcgaaatagcgcacctctacgggcatgcacgttttcgccgattccacgatggtcaacagtgccagtgtggtatgggccccatcctgcagggaaacgtagaacggcgtgcctgtgagcatgcgatgtacaaagctgaggatgctttcaaaggcaaagcccttgggctaatcaaatacggtgtgctgtaccagaatatccggcatgctcacctcttcatccgtaaattgctggatgaggtgatggtggctggcgtctaatgcaggcgtgccctttttagtacatgatgcgtttttggcttgatgcaccggctctaccataaacctgtcagcaatacaacgtatgcgccccaaaatggcgccaatgccggcctttaaacctttgccggagagattatggcggattgtggcatattggggcgattttgccttgcggattgacctgcaggccactataataagagcgtatgccccccatcgatgggggacgctgtgaaaaaagttcttgacaaaccccgctttagcgtcgtatcatcttacctaagaaaaagccgttttggtttttggaaagggagagcctgatgcgcgtgaatacggatcgcaagatgatgcacaccgcggggactatggctatgcgaatgctaatgccttatttccgcctgtcatcctccttgtgtgaaggttcaacgttgcgccggggttaagcaatttccatttaagcgcgtcttgaaacagcagggcagatgatggccctgctgtttttgtgtttacaggcaggaggcggaggtaaggcgtatacaaattctttagaaaagggacgagggagtatgagtgatttaaaaccgatcatcaccatcgagcacctgcaaaaggtgtttgagggcaagagcggtaccgtccgggcgctggatgacatcagcttagagatcggcgcgggcgaaatctttgggatcatcggcctgtccggcgcgggcaagtccaccctggtgcgctgcatcaattttttggaggtgcctaccggcggcagggtgatttttgacgggatggacttgggcacgctggaccctaaggccctgcggcaggcccgccgctccatggggatgatctttcagcagttcaacctgctgatgcagcgcacggcgctgggcaacgtatgctttccgctggagatcgcgggcgtagataaggctaaagcacggcagcggggcatggagctgctcaagatcgtcgggctggaagagcgggcgggcgcctatccttctcagctttccggcgggcaaaagcagcgcgtagccattgcgcgggcgctggccaccaacccaaaagtgctgctgtgcgacgaggccaccagcgccctggatcctacgactactcggtccatcctggcgctgcttaaagaaatcaaccagaccctgggcatcaccatcatcgtcatcacccatgagatgaaggtgattgaggaaatatgccagcgggtggcgatcatcgaccagagcaatatcgccgaggtgggccacgtatccgaggtgttcgcaaacccaaaaagcggcattgccaaacagctggtgttctctcagccctcggcgcaggtgccctttagcaagcggcaggtctaccgcatcgtgtttgacgggcgctcatcctttgagccggtcatcgccaacctggtgctggagtgccgggcgccggtcaatattctgtacgccgacacccgggatatcgaggggcaggcggtggggcagatggtgatccagctgcccgaggacgagctggcggcccagcgagtcctagggtatcttaagacgcaccagattccgtatgaggaggtcgaagcccatgtttgaaccgcaagtgatgcaaatgatcggctggggcattgttgaaacgctgtatatgacgctgttttcttcccttctggcctacattatcggtctgccgctggggctgatcctggtggtgacggataagggcggcattaaacccaagccggtagtcaacagcgcgctgggcgtggtggtcaacctgttgcgctcggttccctttatcatcctgctgattgcggtgatgccggtcacccgctttatcctgggcactacgctgggccccacggccacggtggtgccgctggtcattgcctcggccccgtatatcgcgcgtctggtggaatcctccattaaagaggtggatgcgggcgtgatcgaggcggcccaatccatgggcgcctcgcccttccagatcgtatggaaggtgatgctgcccgaggccaagccctcgctgctggtaggcagcgccatcgcggtcaccaccatcctgggctatacggccatgagcgggttcgtgggcggcggtggcctgggcgatatcgccatccgctacggctatcaccgctacgaggtggatatcatgctggtgacggtggcaatcatggtcatcatcgtgcagatcttccaggaggtcggcacgcggcttagccgccggcacgataagcgcctgaactgacggaataaacaagatcgtatataatatttttgacataacaaaaggagagaggacccatgaaaaagaaagtacttgctgcgcttttagcgctgaccctgatcttcgcctttgccggctgcgccgcgccggaggctaccgaaccctctggtggggatgcggccagttccaccagcagtaccggcggcgccgagcagcagggggataccacgcagctgcaggtcatcaatgtgggtgccagcccggccccccatgccgagatcttagaggtcgccaaagaggtgctgaaagaggaagggtacgacctgaagatcaccgagtttgtggactatgtgcagcccaacctggcgctggatagcggagagttggacgccaactacttccagcacaaaccctatctggataacttcaaccaggagcgcggtacaaagctggtctccgccgctgccatccactacgagccttacggcatctatgcgggcaagaccaaatctttagatgagctgaaagacggcgcgcaggtagccgtgccggcagacgccagtaacgaggcgcgcgcgctgctgctgttggaggcccagggcctgatcaaactcaaggacagcaccaacatcaacgccaccaagaacgacattgtggagaaccccaagaacctgaacatcatcgagatcgaggccgcccagctaccccgctccctgcaggatgtggatatcgcggtcatcaacggcaactacgctatcgaggcgggcttaagcgtcaataaggacgccctggctaaggaggacgccgagagcgtggcggccaccacttatggcaatatcgtggccgtgaaagagggcaaggagaacgatccggccatccaggcgctggtcaaggccttacagagcgataaggtcaagacctatatcgaggagacctatgacggcggcgtgctgcccctgttctaaaaccataacggtaaaaagcccatcccgaacaacgggatgggctttggttttatattgcagggggcatcagtcttcgccgtctaaaatacccttagcctttagaaataggcgatcccgctcctttacggcggcctgggccttaccatcggaataatcgtaaaagccacggccggttttgaccccgtacgccccagactgatagaggtccgccagcagcggggtaggctggctggcattgctcagatccccaaagaggtactgggcgatgtggtaaaaggtatccagcccgcccaggtcgcacacctcaaagggccccaggcaggcgtagcgcagaccaaggccgtacttcatgcatcggtccacatcctcgatactgccgatgccgctctcggcgatatgtagggcctcccggagaatggccagctggagacggttggcgataaagcccggcgcgtccctctgtacgcggatcggctttttaccgatgttttccgccagggcataaatgaattccgcagtttccggcgcggtctcctggccgctgattacttctgccagggggatcaaatgcgccggattgaaccagtgcatccccacaaagcgcccggggttttgcacggcggtggcgatagcggtgatggaaaggccgctggtattggtggcaagcacgcagtccggcggcgtgagggcggagacctcccgccagaaatcctgtttgatggccatgtcctcgacgatggattccactaccaactggcagcggttaaagcatgccttatctgtggtgtaggcgatgcgcccctgcagcgcctcggcctgggcatgggtggatgccccgctttccacggcctggctttggtttagggcaatgagctggcggcccttttccagagcctgctgggagatgtcgtacagcgtgacaggataaccagctccggcgaattgctgggccatggaggcccccatcagtcccgcgccggcgatgacaagggtacgcagtttttgcagctccatcgttacacctccatctctaaaagcgcgctgcccagggtcttgccgtgcatatccacggccagcgagcgggtgaccccgccgcccagcgcgtcctccatcacaaagttaaaggcgtgcaaattcggcagcgcgtagcgagtgaccttgccgtggacgatctgggaaaagtaagccgccacccgttccgacgtcaccttttcttccagcagggggtaatcctccggacggtaggcgatcagactgatcacctagatattgcccttgtcgccggtgcgggaatgggccagttctctaagtttcatcttcatcaaacctcccaataatgtacaaaatgcggcgcatcatccctcggtaccaggatggaagccaccgagacgatcttgcgcaggctcttgaccgcgccgccgccgccggcagggccgttggtgtaaagggcctctacctcgttgcccaccagggcggcatcctgttggctgcggcagcgcgcggcaacgcgcaggcgcacctcgcagggcataccggccatcaggggcgtagcgatctgctcgcgatagagggaatccacccccatcaggtcgatgcgcaattcatcgtatcggcagccaatcgcttcaagacgcttttgaaccacctctccggccagtttggcgcgcgccagcgcggtagagccgccgtagctgatctgcccctcgccgataaagcagtcctgatagcccacgctgaccttgtatttgccattaggagcctgcccggtagcgccggagacggccacgcggtccttgccctgttgggctacgctgacatattggaaatccgccgtgcaatcgggcgtaaaatactgggcggggtcctgtaattcgtagatgatctgttctttgaccgtctgttcgctgaccaagccgccggattgcggcagcttggtgatgaccagatgcccctcttcatccacctgggcgatggggaagcccaggttccacaactccggcacatcctttacgccggggtcgcaaaaatagccgccggtaacctgaccggcacattccagcaggtgcccggcgatggtgcctttgcccaaccggtcataatcctgcatcgaccagccaaattcatataccagggggcccaataccagcgcggggtctgccacacggccggtgatgacgatgtccgcgccgccttgcagcgcctcgacgatgccggcgcagcccaggtaggcgttggcggaaacgatatccgcctgcagctcgcgcagcggccgcccggtctctatcaccggctcgtccagatggcgctccagctggggcagcagatcgtccccggtaacggcggcgatcttcaggtgcgcaaggccttgcgcgcgggccatttccaccgccttttccgcagcggccagggggttggccgcgcccatattggtgatcaccttggtgcgccgggttttcagggcttctaagatgcgttccatacgcatttcaaacaggggattgtagcccttatctggggcagagagcttttccagctgtgccagggcgatggtgcgctcggccaggcattcaaaaatgatgtagtcaagcgcaccgtggttcatcaggtcgatggccggctcgatacggtctccgccgtaaccggcacccgagccgatgcggatcgtcttcatgcttccttccacctttcagtacaacgttttacttaacataagtataacgttgtacttgcagtctgtcaagagggtaatgcggattcggatgggacgcttgacaaaacccctaggcggcgtgtatcgtgggcttagcagttgagggagggcatgacatttggcgacgatgaaggacgtggcggcccgcgcaaaggtatccgtcagcacggtgtcgatcattttaaatggcaaaagccagcagcgcaagatcccgcaggcgacccagcaaagagtgtgggcggcggtacgcgcgctgggctaccagccaaacgtatccgcgcgcaagctgcgcggcggcggggaagatgcgcccggggtgacgatcgcactgtattgggccagcgattttcgcgccccgatgttggcgcgttttttggaaggggtgcgccagcagctcgccgcctgcgacagaacgatggaatgggtgatctatccctatgagaatggccgcctgagccaggatcaggcgctaaagagtttccgccgtttccatgcggcggtggtggccaatgcctcgcaggaggatctgcgctatcttgaagaaaacccgccgcctgggccggtggtcctgtataaccgcaaaagcgcgcggttcccctcggcctatgtagaggatgagcagatcggccaacttgccgccgcgcatctggcggcatgtggttaccgaacggccgggattcttggagcgcctgctgcgttccagggtatggcactgcgggaggaagcgtttatcgccgcctgccgtcaggcggggatcgcggtggagcagcggtggctggtccgcgcggggcacgccattgccgatggcgtcaaggccgcccaggcctttgccgggcaggaggggccgcaggccgtcttctgcgcttcggacgcgctggcgctgggggcgctgcacgcctttcgtcaggcaggggtagccgtgccgcggcagcgggcgctcatcgccgtgggcaatggggaagagggctatgcggcgaccagcgctccgccgctgacggtggtacaggtgcctattgaggagatgggacgcgcctgtgtggcactttgctgtcggctgctggaccgggaggaggatgtgggcggggttgcgctggaggcgcggctgatccctcgcgagagcacggcgcaggtaccggcaaccgcgcgctgatgaagatggaatatttcgttataaagtgaaagagtgaaattgggaggaatggggatgcgtaagtttttagccatcggatggtgcgtattgctggctgccctgctattttgtgtgggctgcggtactttgccgcccatgccggcgggttttgaagaggctgcggtgcaatcggcctgtaaggaggtcatcacccagatcaatacaggagactatcagtgcgtgatcgaccgctggcgggatgccgaggcacaggggctgacggcacaatctctacaggaggcggtgggcccgcgcctggcggaattgggggcttttacccagtttgggcagggattgacggccggcgataaggtagagcagaccggcgaagaattcgcttattgtgtgatgatcgccgaatacgcgggcggcaaggcccgctttacggtcagctttgatcgggatatgcagcttatcggcctgtacatggcctgacgcggcctaaacgaacatctccagaatacctaaggcggccatgcccaagccggaaagacggttcagacggtcttcccgcaggcgaaggccggtatgtacccccaggtaattgcccgcgcccacggagaggaagctaaagatggcaacgcacaggccggtgggcagcgcggcgatgccggtaagcccggcgcccagcgccaccggcaggcaattgacggccagcgccgcgcccagcatgagggcttgacccggggcgatgcgctgggagggaggcgtgcaagcgcagctttcgggttcctcctgcttttggggcccggaccgcatggaccatagccccagcaggatcaaaagggcgccgcccaggtagttgggccagcgccccagctgtgccagcaggaaggagaggtacccaaatatccaggtgaccagcccggagagcagggcgataatggcgttggcgcctatcgggatatgccggcgcttgagcccgaaggccgcgcccagcaccagattatccagattcgtcacgatcccaaccagtaagatggagaagatatgcacttttcggccccctttcgtcctcattagggtatgaaagggggcatttaattgttacccgcgcaaagggtaccgacggcgcgccgtatcgcgcaggccaagcagtagggtcacgatgagtaagagaaaaaaacctccgccaaaagggcggaggttttgcttcataggctattttttgaccaccggcagccagacctcgcagcggtaatccggcgcggacatatcgccatctgtatagcattcgatatccggcgcatcggcatatgtatagccggaggtgggcagccattcggaagcgatgcgcttttgcaggcgctgtatcgccacgggcataggacccacacaggggaataccgcccaggtgcaggcgggtatttcgtattgggccatgccctcgggcgcctccttagtggtagcggcggcgatataatagtcaaaatcgctgccatccatacaggtgcatacgccaaggatgccctcgggcgagcgatccatcaactcgcacagcttggggataaccccgcccgcctcgctccagaaagccgggatgcctatatcggcctcctgcgcaacggccaggtcataatgccgctttacgcctacgattctaaacgcctctttttccacgatctcgtactccatttgcacctctcctttaatcgtcacgtgaaaggcgatgcgcggataggcggaaagccgcacgcccttttcccgcgcccgggagggtgaaacgccgtgcactgccttaaacgcccgtgcaaaggcggtaggcgaatcgtacccgtaacgcagcgcgatgtcgatcaccttttcgccccgctcctgctgcagggcaaaggcggccagcgtcatgcgcctgcggcggatatattcgcctaaaggaatgtccgcgatgtaggagaacattctttggtagtggaaaacggaacagcaggcaatctgcgccgcccgttggtaatctaccctgccttccaaatgccgctcgatataatcgatcgatgcgttgagccgctttatccactccatctgccatcacctcccccgtcactttagtgcggcatggccgcctgatttaaggataacgctgccgggaccgggaagccttgctttccctgccgggatatgcgcgctttgcgccgcaagctcaggctttagccatggcgggacatgaccttgccctcaaatgccgcccgggcggctacctgccccatcagggcgtcaaagctctccggcgtgagggactgggcgccgtcgcatagcgcctctttggggttgttgtgcacctcgatcatcagcccatccgccccggcagcgatggcagcacggcttaagggctccaccatccaggcgatgccggcggcgtggctgggatcgatcaccaccggcagatggctctggcgcttgagcagcggcacggcggagatatccagggtattgcgcaccatggtctcaaaggtgcggatgccccgctcgcacaggatcacgttggggttgccgccggccataatgtactcggcgctcatcaaaaactcctcaatggtgctagaaaggccgcgcttgagcaggatgggtttgcgggtcttgcccagctctttgagcaggcggaagttttgcatattgcgcgcgcccacctgtaagacgtccacatcctcaaaatcttcgatctgggtctcgctcatgatctcggtgacgatgggcagcccggtcatctttttggcggccagcagcagctttagcccatcgttttccatgccctgaaaggagtagggggaggtacggggcttaaatgcgccgccgcgtaggaaagccgcgccgctttgtttgacgcttttggcgatggtggtcagctgcgcctcgctctcaatagagcagggcccggcgataacgctgaaaaagccctgaccgatcttgacgccacccacatcgaccaccgtatcctcaggatggaagcggcggttggcggccttgtagggctcggtgatccgtcgcacgtcggaaacaatctcgttggccagaagggaatcggtatccaccttggaggtatcgccgatcaggccgatgatggtggtttcatcgccttgagagtagtgagttttaagccctagtgcatcaatggtatgcaaaagagaatcgatcttggctttttgtgcatcctttttcagtatgacgatcatgttcatccgctcctttaggtaaaataagaattaaaaaagcagcctttgtcatcaaaggctgcgctttatcgaaatatccttatgcctgcgctacactttagacaacaaaaacggacctgccccagttggtaaacaggtaataataatatccgtatttcgttgcccaaacggcattgttcatcaatacaaacctctttttcaaatggaatggcacatctgtttagtggcattgtagacctgcagcgcgcggtttgtcaagtaaaatttcctggccggaacggattgcccaggcgccaagcggcgttcacggtttgtttacacagatattcttgcattttgtcctaatttgagtatatttagaataggatgatttattgaccgggacaaccccgggcatcaaatataagggagtgcggaatatggctttttttgacaagttgggcgagacgatctccagcaagagtaaagaagtggcgcaaaaggcgaaggacttaacggatgtgaccaagctcaacgcgcaggtcagcgcggaggaaaagacgatcaacgagctgtattttaagatcggcaaggcttattatgaaagccattgcgatggcccggtggaaccggcgtttgaagagctgtttggccaggtggaaagcgcccggcagcgcatcacccagacgcgtgagcagatcagggagataaaaggcgtgcgcctttgcccggggtgcggtaaggagatcggtgacgacgtggctttttgccccaactgcgggcataaaaacgaggtgccccaacccgaggatgcgcaggccgaggcggcggacgtatgccccaactgcggcgcacagctgatggaagactccgccttttgcgtacagtgcggcacccgcgtgcggcccgaataaggaggaaacaggcgatgacgctctacagcaaatggtcactgggtaaaaatatcatgtttatcgcaggcattgttctgctgatctgcacattcataccatggtacacgataaacctttccgatatgtccagcgggctttcccgctatggcagctatagctacagcggcgcggatctggaggatattctgggcgcctttggaaaaggggccaatcattacagcggcgcggcgatggccagcgtgtgtaacatgttccgctttctggtgctggtctttctggcatacccggtcgtgtgcctgtttacgcgcaattataataagttgatgtgctgcctgagcgccgtggccataccggtgacgatcgccatcctgctggtgatgggttttcgctattttaacgtagcggcctggttggcctttgcggcctcgctggcgttctttgtgggtgcggtaatggctgagcctgattatagccgcccgcagcccgcgggtggcgtatccgcaagcatgcccgcagaagaaaatacgccgcttgccacagaagtgcaggataggcccgagggtgctggcgtagctgaggcgcctgtagagcagacgcaggctgaaggcgctgcgccggccgaagcggccgtgccggatacggccccgcaactgggggaggaaacagtaccccctgctgaagaagtcgtgactgaagtgcccgtacagccagagcaagaggcagctgcccctgcagcagagcccgctccggcggtggatgcgcctgcggcagaaaccgtcccgcagcccgaactcgcgccggacgcacagcccgcgttttgtatccattgcggcagcgcgctggtgccgggggccaagttctgcggttcctgcggcgcaaaggtcgagtagtatcgcgctttattgtatgagtaagagccggcaaaacctgccggctcttttttaggaggaaacgatgttgtttgagggcgtgcatcatgtcgcgatcatcgcgtcggactatcaggcctcgcgccatttttacgtagatctgttgggctttgaagttttgggcgaacactatcaaaaaggccgggatagctataagctggatctgaaggccggcaactgcgccattgagctgttcgcctttcccaaagccccgccgcggcccacttacccggaggccagggggttgcggcacctgtgtttttgcgtaagggatgtggcgcagacggtgaaagaattatcagcaaaaggcatccgctgcgagccggtacgcgaggatgaatacagcggcgggcggtttactttttttatggatccggatggcttgccgctggagatccatgaggcctgaagaatcaaataaaaaagcggggcgcagcggccccgcttttttatgttgttaaccgttatggccctttttatgccggtagaaccagtatccgccaccggcgccagcggccaggatcagcaagatcacaacggctgcgccagcgccattgccagaggcgccatccacattggcggatgcggataagagcgccggcgttggcgatggagatgcggccggtgtgggcgtagggctgggcgaaggtgtgggcgtgggagtaggtgtaggtgtaggcgaaggcgtgggggtgggcgtaggctcgggggtaggcgttggggtcggggccggcgttaccttgggggtagctttggactttgcactgccggaggacgtaccctgattgctggaattagatgagctgcccgaattaccgcccgagctgccggagcctccactggaggaaccataatccccataggggcatacgccgccggggtggtcgtgcgccgggtgaccgtggtgatagtgatagccgccgtttttgcggtcatggtggccgccgttggcatcggtcctaccggagtgggctagcccgctggggactagcaacaccagggccaggagaaacgtgagtagtgcgcataggatctttcggaacatgttaactccctctctcgatatgttataaacagcacgccgctgttggagaacgaggcttaaagatggggcatgaaaaatcagaaactggggaaaacgcagacaaaagcgtaaaacgtgttttgagatgattacacgtataaataacgtatatatacataagatatattcggatgagaaatctgtcaagtaggggcgaaaatgtggggagaaaaaggctatcccggcgcggatatgcggcaaatatgctatacttgaagggatctaaggtgaaaagagggtgtaacggtggaacattatgagctgttctccgcgcggtttgccttttgtcccctgcggcaggaggatgcgcaggatgtatacgccttgactggggacgcccaggtggcgcggtacatggcctttagcgcccatacagatttggaccaggcccgggcgttgatcgagcaatacaacgcaggcgctggccaggggtttgccctgcgggagcgggagagcggagaatttataggcgtatttgcactgaaagaggccaaggtcccgggccggcgggatatcagcatctttctcgcgccaagttggtggggaaagggctgcgccggcgaggttttcgcctgggctataggttatgccgcccgggcgggcatcgcacagttggcggcgcacgtggcagccggcaataccgccagccgcagggcgctggagaaaaatggctttatcctgcacgaagtgctgcccatcgaggggcttgcgggcgggctttgcgtctatctgcggattttggcggcggattacgcctggataccggattatctcaaggctaaaaagggcgtaacgtgggattttaaggtggagtggcagtgggagcggtacaagatcggggaaaagctgtttgccgcgctgtgcaaaaacaaggcgggaaagcctatcgtttcgctcaagtgcgagccggaggtcagcttgctgctgcagggcgaatatcccggcattcagcccggatattactgcgataaaaagcactggatctcgattcgtttagatggctctgtgccggatacggtgatcaaacagcggctggatacggcgtatacgctggtgctgcacaagctgccgaaaaagcgccaagaacagattctgggttagtcttgccttgcgccaacatagcctaggcggtataataaatatactgccgcttgggaggagagaggcgcgttttggagaaaatcgccgccaaaagtatcatttcgcgggcacaaagccccgcatggttcggcgtagattacaacatgaatatctaccgggggtgcaaccacgactgcatctattgcgatagccgcagcgcctgttacgggatcgagcggttcgataccgtgcgcgccaagcgggatgcgctctggctgatcgatcgggagctggccgctaagcagaaaaagggtgtagtcgccaccggatcgatgagcgacccgtataatccttatgaaaaacaggaacagttgactcgcggtgcgctggagatattggcgcggcggcgctttggcgtggcaatcgccaccaaagggacgctgattgtacgggacattccccttttgcagcagattagggcgcacgcgccggtgctgtgcaagctgacgatcaccgcggcggacgatgcactttcgcaaaaggtagagccgggcgcgccgccgtcttgcgcgcgctttgaggcgctgcatgcgctgcgccaggcggggctgtacgcggggatattgctgatgccggtgctgccctttattgaggataacgaggagaatatcggcgccatcatttccctggcggcgcagacaggggccaactttatctatcccgcctttggcatgaccctgcgccagggtcagcgcgagtattattacgcgcagttggacgcgcgctttcccggcctgcgcggccggtatgtgcgccagttcggctctcagtatgagtgcgccagcccgcgtgcaaagactctgtggcagttttttaaaaagcaatgcgacgcggcgggcatcgcctatcgcatggatgagatcgttaggcaataccgcagcggctaccatgccgagcagaccgcgctgctttagaagggcacgcaaaagactggtgagagggaggaaataccatggatactacgggcaacgcgacgcgcaaaacttcggagctgatccgccggtttgcgccgtattttaaaaagtacaaatgggtgctggtgctggatctgttctgcgcctcgctgaccacggtatgtgagctggtgctgccgctaatcgtgcgcttcattaccggcaaggggatggaggatatggccagcctgacggtgcaggtcatcttgtcggtgggggcgctgtatctggtgctgcgcattatcgataccgtagccaactactacatggcctcggtggggcacgtgatgggcgcgcgcattgagaccgatatgcgccgggatctttttagccacctgcaaaggctgtcctacaattattatgaccataccaagatcggccagatcatggcccgcattaccagcgacctgttcgacgtgacggagtttgcccaccactgcccagaggagttctttattgccgggcttaagatcgcggtatccttcgctattctgggttcgatctacatgccgctgacgctgatcatctttgcggtgctgccgctgatgctcttggcggccatgttctttaacaagcgcatgcgccgggcctttaagcgctcgcgcaaccagatcggcgagctcaacgcccaggtggaggacagcctgctgggcgtgcgggtggtcaaatccttcacgaacgaggagctggaaaaggaaaagttccgggaagggaaccagggctttttaaacatcaaaaagcagatgtatcgctacatggcgctgttccagtccagcacgcggctgttcgatgggctgatgtacatcaccgtggtggtggccggcgcgctgtttatgatctatggcaagattaccccagccgactttatggcttatctgctctacgtcacgaccttgctcacctccatccgccgcatcgtggagtttactgagcagttccagcggggtatgacggggatcgagcgctttttggagatcatggacgcgccggtggatattgaggacaagccgggcgcacgggtgctggggcaggtcaagggagctatcacctttgaccatgtcagcttccactatgtcggcgaggaggagatggtgttaaaggacatcgtccttcaggtctccccgggcgaaaatgtggcgctggtaggcccttccggcggaggcaagaccacgctttgcaacctgatcccccggttttacgatgtaacgggtgggcacgtgctgatcgatgggcaggatgtgcgggatgtaaccctgcaatcgctgcgggcgcagatcggcgtggtgcagcaggaggtctatctgtttgccggctcggtctacgataatatcgcctacggcaggccgggcgccagccgggaggacgtgatccgcgcggccaagcaggccggcgcgcacgagtttatcacccagctctcccaggggtatgacaccgatgtgggcgagcggggcgtaaggcttagcggcgggcaaaaacagcgcatttccatcgcccgggtattcctcaaaaatccgccggtattgatccttgatgaggccaccagcgcccttgataatgagagcgagcggctggtgcagcgctcgctggaggagctggctaagggccgcaccacctttaccattgcccaccggctgaccaccatccgcaacgcaacgctgatcctggtgctgacggaggatggtattgccgagcggggcacccatgaggagctgatggcgcgccaggggctgtattttgagctgtacagcatgtataccgaaaaggagcgccagggggaagcgcacttttaaggcgcatgcgctcgcttttcaaatccgcagatcggtggtaagataaggcggtaaaggaaggtgatgcgacagtggaaattttggctaaaaatgtatgtgatcttacggtcgagctgtatggccaggccgtacgcaaaagcgtaaaggggtggtacaaatggctttgctatatcctgggcgggatattgatcgtagcggcctccctgctgatggggctgggcatcgcgatgggcagcacagcgtctatccttgaggcggtatttttcttgctgatcggcattttcgtgttcgtatgggtgtgcgcgctcttcccgcgggtgatggccaagcggggctataagcagatgctggcgctcaacagcggcaagccgatccgaaagaccacctgtttttatgcagacgaggtggaggtactctccagcaacggcgcccgggcgcgcctgcagtatgccaacgtcaagcgggtgtacggaaccgagcgattgatcattgccgaatttgagggcaatgtggcagtgctgctggataaaatgggctttgtcaaaggctcaccggaacaggcccaggcgctgctggaatcccgtaagcaataagcgcaagacgcaaaaaggccccggcattttgccggggcttttgctgtgctgtagttttatgcttttccacgcaggttagaatttccaatactgtcattcttcgccgcgcgtggggcatacctccccaatagacaagtggagagaggctctaacttgcgcaataaggcatactttagcactcgctccgttgtcattcagagggaggccgtaaggccgaacgaagaatctcgtgcatgtgtaggaaagcggcgcttgacctgctttgcgcggtacaggcgaagctaacaggacgtaaggggattcctcgctggtgctcggaatgacgatccccaaaaaaccaatctatggggaaaagtatgcctattcaaaccgcctgtcgataatgcgtacgctctttttctcgctgcggggcagctcgccgatggcgtggccgcgggcactgatcttaatgccgatgcggctcttgaaaaagtggatgacctgctgctccaggctttcggccaccacgccgggctccatttcaaagttgagcagcatctcgtcccggccgtttacatggtctacgaatacctgatattcgctggaaacgccttccacatcccgcagcaactcgtcgatctgcccgggatagatgttgacgcccttaactttgatcatatcgtccgtgcggccgataatccggtcatgccggggatagggaagcccgcaggggcactgcccgggcaatagccgggtcatatcgtgggtgcggtagcggatcagcggcgcgccctctttacacagggtggtgatgaccagctcgccgtatttgccgtccggcaccggctccagcgtctgggggtcgatgatttcaaaatagagataatcgtcccaatagtgcaggccgttgtgcagggagcagtcgatagagatgccggggccgtagacctcggtcaacccgtaaatatcgtagatctcgatgcccagctcgttcatgatgcgggcgcgcatcttatcgccccagcgctcggagccgatgatgcccttgcgcaggcagatctggtccttcatgccgcgggcttgcacctgctcggccagcagcagcgcgtaagaggaggtgctggctaacacggtgcttttcaggtctaccatcatcttgagctgcttttcggtattacccggccccatggggatggccatggcccccagcttctcgcagccgttttgaaagccgatacccgcggtccacagcccataacccggggtgatctggatgcgatcctgccggttgatgccggcgacctcatagcagcgcttgaacatctcgccccacacgtccacatcgtttgcggtgtaggggatgatgatgggctgccccgtggtgccggaggaggagtggatgcgtaccacctcttcatccggcacggcctgcaggcctagtggatagacctcccttaaatcgcctttgttagagaggggcagcttgcggatgtcctcgggagtcttaatatccgcagcttcgatccccgcaaacatcttctgataaaaagggctgtttttcagcacatagtccagctggtttttgaatttttcaaattgcaattctgtcatcattttatttacctcccgccttgcagatactggtatccgctttccaacgcccgcagattgatctctttaaaacgggcgggcacgctctgggcgagcacctgacgcatataccctaggtcaaaatccagcaggccgcaggcaatgcaggcgcccagcagtacggtgttgcctgccttagcggagccggctgccagcgccagctcgtccgccggcacaaagagcgcgtccggcgcgtgcgcctgcagcgctgcgaggatggcctccttttcgtagggcgcggcgccaagggcgctggtcaccgggacgatggtacgttggttgacgatcacccggccgcccggctttaaaaagggcaggcagcgcacggcctcggcaatttcaaaggcgatcagcgtatctgcgccgcccggagggatcagcgcgcccttatcttgactttcgatgcgtacatggctgaccacgcagccgccccgctgggccatgccgatggtctccgccgtgcgcacgaactggcccctgcccatagcggcctgggcaatcaggcgggaggccagcaccgtcccctggccgcctacgccgcagatcaggatatcgtttgctttatgttgctgggccatgttatgcatcctcctttttgccaatagcgccggtggggcagacctgggcgcacaggttgcagccataacacagcccaccgtcgatacgcacctttttaccatccgggaagatggccgggcagccgatctcgcggatgcattttttgcagcccacgcacttgttggcatttacggccatggtgtagctggccttgttcagcgcgatgcaggggcttttgaaaataatgaccgatacgcccttgtgtgcgttggcccggcgcactacgtctacagcctgctccagatttagcggatctgccgtttccacaaattctgcgccgcaggccctgcacagcccggcgatgtcgatgccgggtttgaccttgcccatcatggtgttacccgtgccagggtggggctggtgcccggtcatagcggtggtggaattatccaggatgacgatattcacgtccgcctcgttatacacggcgttggcaaggccggtaataccgctgtggaagaaggtggaatccccaataaaggcgaaatgcgccccatcttccacgtggcttagcccctgggcaatggttaccccggcgcccatgcaaaggcaggtatccgtcatatccaggggctttgcattgcccaaggtgtaacagccaatatcgccggagaataccgccttttgtcccttcattgcctgtttaacggcataaaaggaggcgcggtgtggacagcccgcacaaagcaccggcgggcgggtgggtagcggcggcagcgccatagctgcgccctcgggtacctcccagccgccaaaagcggcaaaggcctttttcagcatggggacggaatactcgcccgcgtagggcatgtggccggtgcgcttgcctagcagctcaaacggaaggccgtacttgcccttgaggcgataaagcgcctcctcgatcaccgggtccagctcctcggccaccagcactttttgcacgccttcaagcgcctttaaggcgaaatcttcagggaaggggactgcgcaacccagcttgaccaggcgcagactgtgcccggaggcggccagcgcctccttggcgtacccgtaagccgcgccggaagcgaataccgccaaaggtcctttgccctctacacggttatagggactggcggaaaacagtcgggcgatctccagattcttgccctcgagttcaatatgtttacggtaagagagcggggggaagatcacccacttgggatcttttacaaatccctccaccggatggcgctggttttgctcgggcagttcaatactggcgcaggcgtggcagatgcgggtggtaggccgcagcaataccggcaggcccgtctgctcgcttaaggcaaaggcgtcctgtgtcatggcataggcttcctcgggcgtggaggggtcgaacaccggcagtttggagaaaatgccgtaatgccgggtgtcctgctcggtctgcgaggagatggggcccgggtcgtccgctaccaggatgaccatgccccctttgacgccgatgtagcttaggcacatcagtgggtcgcccgccacgttcagccccatctgtttcatggtcaccatcacccgcgcgccggcataggctgcgccgccgcctatctccatggccaccttttcgttgatggaccattccacatacgtgtctttttcccgtatcttggccacggtctccagcacctctgtcgagggggtgccggggtaaccgcacaccaggttgaccccacaatttacggcagcgtaggcgatggcctcgttgcccatcagtagctttttcaatctccttaaccccttttgcacatgcttttgtttattgccaatggaaatacgccatcaaaaaaacccacccctgtttcaagggtgagcttttaatctcacggtaccaccttgcttcggcatgggatgcgtcaacaaaacgcctcttgcgccgcgcttacgtatgggaaaccagtcatttcccttccctgtaacgggggataccgccgcaggatacccggctttcgctttcccctgcgggcctccagggcccattttaacggtgcgttccttacgggctttcagcctaagacccgtttctctttcaagactgccgccgcttttaattccctgtcattggcatagacttttatggacgcctttattttagtccattcgtcgaattctgtcaacactggcttgatggcaaggaagccgtacaaaaatggaccgccagggcggcgcagatggtggaggatctgcccgtctataatgggctgccggccgcacgctaacgctgagtggctgataacctgcaaatgtgggcccgatgagcctttttcgtcagttttgcattagctctgctgtgcgggatgttgcagctttttactgcctatatccccctggaggggtaaatagcgacatatcttcagtaagctttagcaaatcctcaatatgctggcactgatgctgcccacgttgatggcctattctactaccaagctggggtagtgcaactatgcttacctagcacagaagcatgaacacgcgatcggaggatctggcgtattaatattgagtaagaactaaatcagaggattactaagaacgataaaaagggacgcgatcgcgtccctttttgaatatccgctttggtttactggggcagatcgaacccggggttgaaggcataaaaattgcgcgcgtccaggttatcctgggcgatgcgcagcgcctcgccaaaccgctggaagtgcacgatctcccgctcgcgcaaaaagcggatggggtcacacacatccggatcgtcgatcaggcgaaggatattatcgtaggtggtgcgcgccttttgctcggccgccatgtcctccatcaggtcggtaataatatcgccctttgactggaagtaagcgctggtaaaggcatcgccagaggcggcttgcggccatacgccgttggtatggtccacaaaatacgtgtcaaagccggcggccttgatctcgtcaatggttaaattgcgcgtcagttgatagatgatcgcccccaccatctccaggtgggccagctcttcggtaccgatatcgttgagcacgccggtcacctgccggtaaggggaagcatagcgctgagatagatagcgcatggaggcggacagttctccgtccggcccgccgaactgggtgataatcaccttggccagcgccggattggggcggctgatctttaccgggtgctgcaaacgtttttcatagatccacatcgtccttacgcctccttttcccagggccagggcgtttgcgcccaggtccagcactgcgtgttgtacaccaggtccgccgtaagcgggccgaattgctgggcatattgctgcagaaggtttagccgggcatcacggtgctgctcataaaagcgcagcgcctcctggtcgtcggggtgggtattgaggtagagcttgacgtcatccacggcaaagctcgcctgatcgatctgctctaatagcgcttcacggcacatggattgacacctcctttacccaaaaagggtaggtccagttcgctgaaaatggttccgcgggtcagcgcgcgggcatcgtcgtagatggcgcgccactgctgccagggcacgtaagccatgccgatgggcagtccgccaagatcgcgtgaatcatgctttaaataacgcatcaaagtgagacaactcctttctgtctaagcttgaaggctacatgagcaatatatgcactgtggatactgccggtgcatgctggcggatatgaaacggggctgcatagatatatttccagccctgcgccaggggatgttgacggggcaggcaaagcgcggtacgatgaattaaaaggcctgagaggagatggaagcgaaatggcgatcttgatcaaaggcgggacgatcctgtccggcggcgagcggcgcgaaaacccggggcttttactcaaggatggaaagattgccgggccagcgcaggccgaacccgcccggatattggacgcagggggcggctatatcctccctggattggtggatatccatacccacggcgctttagggcgggattttaccgaagggacgcaaacggcgtttgataccatcacccgttttgccgtgcgccacggggtcacttctcaggtggcaacgctgtttaccatgcccatggcgcagatcctgcgctgtatccaatttgccagggactaccggcgccacccccaaggcgcgcagatattgggcctgcatttagaggggcctttcatcagcccggagcgctgcggcgcgcaggccagcgatgcggtgctgcccattgcgcccgaaaactatgccccgctgctggcgcaggccgatgcgatacggatgatcaccctctcgccgcactgcgcgcaggcagagcagatggtgcgggcgttctgcctgcggggcgttaaggtggccggcggacatgacgacggttatgagcccatgatcgccaaatgctttgacgcggggatgcaccacaccgtacacctgttttgcgctatgagcagcgcgcacttccgccagggagaaaaggtcgcaggcctgaccgagatggccctgctggacgaccgggtgagcgtggagctgatcgcggaccgggcgcataccaccccggcgctgatcgctctggcctgtaagtgcaagccagccgataaggtctgcctggtatcggatatgctcagcgtgggcggcctgcccccgcaggaggagccgtacagcatccgcatcccgggggtcgaaaaggcgctggaggtggagatcggcccgcgctcggccaagctggcgggcagcaaccataatgctggcggcatcacggcgctggataggatgctgcgcaatatggtggaggatggggttccgctggaggcggcggcgcgcatggccaccgagaacccggccctggccatcggcgcccggcaaaagggacggatcgagccggggatggatgcggatatttgcatactggaccaggaactgcaggtgcgctatacgattatcgcaggcgaggtcgtctatcataaggaggtatagaaggatggatcagaaactgttggcggtactcaatatcccggaggaagaactgggcaagggaagccctgtcgcccttgaagtggtgcaggatgacgaaatgatgtgccaggccatggcggaggagatcctggcgctggtgcgcgagaacaacgcggccgggcggcatacggtattcatctggccggtgggcccggtagggcagtatgcgccgctggccaggcgcatcaatgctgagcgcatcgactttaaaaatgtgcatgtattccagatggacgaatacctggatgacgaccttgatcccatctctgaggatcatccgctgagctttaccggctttctcaagcggtttttccagtcgatcgatccggagctgcgtcccgcgccggagcaacaccacatccctacccggggacgggaagcggagaactggacggagattcagcgcctgggcggggtggatatggcggtgggtggcatcggcatcaacggccatattgcctttaacgagccgcccgagccgggcgaatccatcagcgatgcggcctttaaggccctgggcacgcgggtgctgcgcatcagccgggagacccgtaccatcaacggctttaccggcgcgcgcggcgcgatcgacctgatcccgcaatactgcatcaccattggcatgaaggagatcctctcggccaaaaagatccgcttttattgcaaccgggagtggcagtgcggcattgtgcgcaagattttgcatggggaggtcagctgccatgtgccagcctctttcttccagcagcatccggacgccaagctgacggtgacaaggcaggtggcgcgcgtcccaatgggggcactgcgctgaatacggcttataaggcggacccagcaggctgggcccgccttttttctctctataggcaagggacgcaagatacggtataataataataggcctaatgccttaggagggatgttttttgcaaaagaagatcacgctgtatgatacgacgctgcgcgagggcgcgcagggcgagggcgcggcgtttaccgttaaggataagctgaagatcgtagggctgttggatgaggcgggcgtgccctatatcgaatgcggcaaccccggctctaaccctaaggaccgcgatttttacgcggctgcagccaagcttaagctgcgccaggccaggttggtggcctttggggcgacctgtcgcctgggctcaagcccggagcaggacgagaacctgaaggcgctgctggcggccaatacgccggcggtggcggtatttggcaagtgctgggatttccatgtgacggatatcctgcgggctaccctggaggagaacttgaagatcatatcgaataccgttgcctacctgaaggccaatgggcgggaagtgatctttgacgcggagcacttttttgacgggtacaaacatagcccggattatgctcttgccgccctgcgcgctgccgcgcaagccggggcggactgggtatgcctttgcgataccaatggcggcagttttccccatgagatcgggcccgcggtacgcgcggcctgcggcgcggtggactgcccggtgggcatccactgccatgatgataccggcatggcgcaggccgataccgttgaggcggtgcgcgccggggctacgatggcgcagggtacgctttgcgggctgggggagcgctgcggcaataccgacctttgggtgatcgcggcaaacctgcaggtgaagctgggctatccctgcctaccggagagcagtattacccgcctggccgcgttggctcagctctcggcggagacgatgaacattaccctgtactcgggcagcccctatgtggggcgcaatgcctttgcccacaaggcgggcatgcatatcgacgcggtcaagaaggatccccgttctttcgagcacgtccctcctgaggctgtgggggccaagcgccagtttttgctctccgagatctcgggccgtatggcggtcttgcagcgcgcccggcagatactgccggagctgaccaaggactcgcccgaaactcagaacatattaagcgagctaaaggcccttgagaaccgcggctatcagttcgagggggcggacgcttcctttgagcttttggtgcggcggatgaccggactggggcacacctattttgatctaaagggttttaaagtcatcattaacgagccggcgctggatggccatgtggccagcgctatggtggagatcgccgtaaacggcgaggaggagatttccgccgcggtggggaacggccctgtaaacgcgctggacagggcggcgcgcagggcgctggagcgtttttatcctagccttaagaccatgcatttaagcgattttaaggtgcgggtgctggactccagcgataccacggccgcgctggtgcgggtcatcatcgagtccagcgacgagaccggcagctggaccactatcggcgtatcctcggacgtgattgaggccagctggcaggcgctggtggattcgctggaatataagctgctgcgcgaccaggcccagccccaggcgggggaatgacggcaataagaaagagcagaccggcatggcctgctctttttttagtttgccgacggagttaacggttgcgcagcggatcctcccgatagtcgcggtaacgcttggccaccacgccgcccagggccagcacgcccagcaggttggggatgaccataaagccgttgaacatatccgaaagcgtccatactagatcgaccttgaggcaggagcccagcacgataaagcccaccaccagcaatgagtagaatttgaccgccctttgcccgaacaggtaacggatgttggcctgaccaaaaaagtaccaccctacaatggtggagaaggcgaaaaagagcaggcagatggcgataaagatattgcccgcctgtcccagcacgctggaaaaggccacctgcgtcagcgcggtgccggtctgcccgctgcccagagccccggtggtcaaaatggtcagcgccgtgagggtgagcaccacaaaggtatccataaatacgcccatcatggccacgatcccctgatcgcaggggtgcttgaccttggcgatggcgtgggcgtggggggtagagcccataccggcctcgttggagaagaggccgcgcgccacgccaaagcgcaccgcctctttgatggtgatgcccaaagcgccgcccattacggcctgggggttaaaggcgccgataaagatggactggaatgccgggccgatctgctggtagttgaccccgaccaccaccagcgaacccaggatgtatagcagcgccataaagggcacgatcttctctgttaccgaggcgatgcgccctacgccgcccataaagataaaggcggccacagcggccacagccagccccacacaccaggcggggatattgaaggcggtggagaaggcctcgccgatggaattggcctgcaccatattgcccatgaaccccagcgccaaaatgatcagctcggcgaaaagggcggctagaaatttgccgaagcgtccgcgaaaggccgctttgatgtagtagaccggcccgccaaccacctcgccgtccaccgtggttttatactcctgggccagcgtggcctcggaaaaaatggtcgccatgccgaaaaaggcgctgacccacatccagaacactgcgcccggcccgccggatacgatggccgtggccgcgccggcgatgttgccggtaccgatctgcgcggcgatggccgtggccagcgcctggaaagagctcatcccatcccggcccgccttgtcgccccgcaggcggatattgccaaatgtggccttaaagctatccttaaacttcgcgatctggatgaacttaagccggaaggtaaaatagatccccgtgccgcaaaggaggatgagcagcacccaatcccacaatacggtattgatcccgtttactacctgcatcacagcgtccaacgatacccctcctgataaaaaattaacaaacagttcctattgtaaccgatagcgcggcctgtgggaagggatttttgcagaaaaaagcggtattttgcgctgaaaacgcctttttatgtgcaaaaaagccgcccgcacaatagcggcgggcggcctggggttggaaaaagccagtttactgcggcgtcaagcgctccaattcatcgagccagagggcggcgcaggcatcgctgggcatgcgccaatcgccccggggcgaaagggtgaccgaacccaccttggggccatccggcaggcagctgcgcttaaattgctgggcaaaaaagcgccggtagaaggtgcgcagccagtggagtatggtattgccgtcgtacacgccggcaaaggcatagcgcgccaggcggtagaccttggcgggcggaaaggcccagcggatggcatagtataaaaagaaatcgtgcagggcataggggcctaccagctcctcggttttctggacgatttgtccctggtttgcgggcagcaactctgggctgaccggggtatcgagaatatcctgcaatacgctgcgcagcgcctctccggactgggaggccgcataggctaccaggtggcgcaccagcgttttggggatggaggtgttgaccgcgtacatggacatatgatctccattataggtggcccagcccagcgccagctcggacagatcgcccgtgccgattaccaatccctggcgctggttggcgatatccatcagtatctgcgtgcgctcccgtgcctgggcgttttcgtacgttacatcccgcaggtcagggtcctggccgatatcggcaaagtgcccggttacggcggaggcgatattgacctccagcagggtgacttccaggcgctggcaaagggcctgggcgttgcggtgggtgcggccggtggttccaaaccccggcatggtcacggcgatgatctccccgcgcggacgcccaagccggtcaaaggcgcggcaggttaccagcagcgccagtgtggaatccagcccgccggagataccgatcaccgcggtgcgcgcggccgtgtggcgcaggcgtttttgcagcccggcagcctgcatggccaaaatgctttcacaccgggcgtcccggctggggccatcctgagggacgaagggagaggacgaaacctcgcgggtcagttgggtctgagaaaggcacatatcaaaggggaggacggtgtagcccgccggctcaaaaccgaagctggtcagccggcggcgctcgccttccaggcgctgtacgtcgatctcggtcagcaacagacggggcgcgaagggctgggcttgcgccagcagcgtaccgttttcggcgatcaggcagtggccggaaaataccatgtccgtagtggattcgccctctccggcatctgcatacagataggcgcataccagctgggccgagtgggcgcacagcagttgcctgcggtaggccgccttgccgatggtctcgtcgctggctgaggggttgcagatcaccgtggcaccggccagggccagcggacccgatggcgggatggggacccatagatcctcacagatctccacgcccagcgtgaattccggcagctggttgcacctgaatagcagtttgctgccaaagggcacatcgcgcccctcccattggaaagttcgatcctcttccggcgcgggggagaagtggcgcagctcgtaatactcgccataattgggcagatggctcttgggcaccagccccagcagccggccctgatacagcaccgccgcgcagttgtaaagccgcccctggctgcggatgggcaggcctataacggttaccatttccagctgtgccgtctggcgcagtatctgggcaagcgctaaaagcgcgccgtccagcagcacgcgctgcaaaaacaggtcgccgcaggtatacccggtcaggcacagctcgggcaacaccagcagctttgctcccttgcgggatgcctcctgcatggcggatatgatttgctctgcgttataggcgcaatctgccacacggatctccggcgaggcggtagcgactttgataaaaccatccttcataacctacatctccccatttatacccatcagggcggtatattacccctctattttaacggatgatgtagttttgatgcaaatcgacggattcgtcccgccctttgttgacaggaaggggaggagtccttacaattaataaaacaggctttgcgcctgcaatgggaggaatttatgcgcaagaagcggattatagtaggattattgctggctctgcttttaatgctggcggcctgcgcgccggcgggcgacggtgcggacctgggggcgctggacgctttggatctgaccggcgagcgggtcgacgcgagcatttttaaagagcataaactgaccatggtcaacatctgggcgacctattgcagcccctgcatcagcgagatgccagcgctgggcgagttgaacgatgcctatgccggacaggggtttcaggtgatcggcatcgtgacggacgtgctgaatagggatggctcgatctccatgggccaactgcagcaagcccgccagatcatcagcactaccggggcggattaccggcacctactgccctccgaatcgctggatgcggccaagttgaacgcggtttccgccgtgccggagacgttttttgtgaatcaggcgggccggcaggtggggccgacctatgtgggcgcccgggacaaggcggcctggcaggctattatcgaggagatgctagccggggatatagaataaaacggatagacaaagaggataggatgcgggtatgatcgattttctggtgcgcaaattcgtgcgggattatgataaagtgcaggatgtgcgggtgcgccagcgctatggtaacctggccagctgcattggtgtgctgtgtaacctgctgctgtttagcggcaagtttgtggtgggtacgctctttcaaagtgtggccatcacggcggacgcagtcaataacctctcggatgcgggcagctcgctgatctcgttggtcagctttcgcctctcaagccgcccggcggacagcggccatccctttggccatgcgcgcattgagtacatcgcctccatggtggtagggatattggtactgatgctgggggtggagctgatccgctcgtccatcgatcatatcgcccatcctccggccattgagttcagctgggtcagcgtgggggtcctggcggccagcatcctggtcaagctgtggatgttctcctacaaccgtacgctgggcaaaaggatcgattcgatggtgatgcaggccacggctaccgacagcctctcggacgtgctggccaccggcgcggtgctgctctctacgatcatgagcccggcgatcggcttccagctggatggttacatgggggcgctggtggcgctgttcatcatcgtatcggggattcgcatcctcaaagataccctcaaccagttgttggggcagacgccggatcaggaactgaccaatatgatcgccactaaggtgctcagctatgacggggtgctgggcatccacgacctgatggtgcacaattacggcccggggcggtgcttcgcctcggcacacgtggaggtctcctccagcgtggatatcctgaaaagccatgacgtgatcgacaatattgaaagggactttgataccgactgcggcatccacctggtgatccatctggacccgatcgtgaccgatgacgagcgggtcaacgcgctgcgcgttaaaatggcgcagatcatccggggcatcgacccgctgctgtccatgcacgatttccgtgtggtgctgggggagacccacagtaacctgatttttgacgtatccgtgccctttgaatgcaaaaaggcggacgatgagatcacccaggcgatctatagcgcggtaagtcaaatggaggggaagtgctacgcggtagtcaccattgaccatgcgtatatctccgagaccaaaggcaagaccaagatgaactaaacctggctacaggaggaaagaacggttgaaacggctgagcaaggcatcccaaaagcggtgggccgcgctgaccgtggtgatttttgccgtcgcgatctctatttgcatctacattgcccggctccagcagtatgcggattggcaaatggcaaacggcgtagttttgcaggtggaacgctataccacggggggcaaaagtccgggcagcaagcggcaccaccgcattaattacgcttataccgtttcgggggtggaatataccgccagcgacagttatgccggctatgacagcgcttttgccgcaggagaccgggtggagatctggtacgatcccggcaaacctactcaggcctccttccataagccccatcccgggctggatccctatgtaccctgtttttttgcagctccgctggtcctgggcctgctgggccggggacgtaaaacagcgcaaagaaaaaggcgaacgcggagaaagggtagcagcgaataaaataaacggcgccgtctgagcagacggcgccgtttttgcacttagtgggtgcttatttatggggaagcagagccttctcctgcagttttgcgaccttatccggcacggcttcgggcagatgcccaaaggggaagggcagccccagcgcatcgtatttggtctggcacagcttccggaagggaagcagctccaccttgcgtacattggggtgtccggcaaggagtgcgttgagccttgcgatattcccttcatcatcgtttagggtggggacgatcacctggcgtatccagcagggaatatttcgcgcggtcagctcgtctaaaaagcgcagcggggccgcaagcgaacagccggcatagcgctgatagtccgcttcgatggtgaacttgatgtccagcaaaaccagatcggtttcatccaaaagcccgcgcaccggctcatccaaacggcagccgctggtatccagcgccgtgtggatgccgccctcccggcacagggcaaaaaaagcctgggcgaagggagcctgtagtagcggttctccccccgaaagggtgaccccgccctcccggccaaaatagctgcggtagcggctggccagcgcaaacagggcttggggcgtataggcctgtccgccggcaaggggctgcgcatccgggttatggcagtacccgcagcgcagcgggcagccctgcacaaaggccacgaaccgtacgcccggcccgtccaccgcgcccagggtctggatggaatggatcagcccttccatgttttatagcgccgcatggaaggtgcggctgatgacctcgcgctgctgatcccggctgagcttgtggaagttgaccgcatagccggaaacgcggatggtcaggttggggtaggcattcggattttcataggcgtcgatcagcttctgccggtccaacacattgacgttgatgtggtgggcccggttgacgaaatatccgtccagaatggcgaccaggttggccgattgcgcctcccggtcggcccccagggcgctgggtacgatggagaaggtgttggagatgccgtcacggcagcaatcatagggcagcttggccaccgagttgagggaggccagcgcccccatcttctcccggttgtgcatggggttggcgccgggggcaaagggctcgcccttcttgcggccatccggggtggcgccggtctttttgccgtacaccacgttggaggtaatggtcaataccgacagggtgtgcagcgcgccgcggtaggcgggggtctttttcagctccgcgctcactttggccagggtctctaccgccatttgatccacccggtcgtcatcgttgccatattgggggaattcgccggtggtctcaaaatcgcagatatacccctgttcatctcgaatgggacgcacctttgcgtagcgaatggcgcttaaggaatcagccaatacgctcagacccgccacgccaaaggccataaaacgctctacgtccgtatcgtgcagggccatctgggtcttttcgtaggcgtacttatcgtgcatgtagtggatcacgttcatggtattgacatacagcttgcacagccagctcaaatactgctcgaaccggtccatgaccgcgccatactccagctggtcgccctcatagggaggcatctgcggcccaagctccagcccgctaagtgggtcgtgtccgccgtttaaggccagcagtaagatcttgggcaggttgcaccgggcaccgaagaactgcatttgcttgcctaccttcatagcggaaacgcagcaggcaatagcgtaatcgtccccgtacagaggacgcattacctcatcgttttcgtactggattgaatcggtatcgatggagatcttggcgcagaaatccttgaagccttccggcagggcgggggaccagagcaccgtcaggttcggctcgggcgccggccccagggtatacagggtattgagcatgcggaaggaatttttggtgaccagcgtgcgcccatcttcgcccatgccgcccaccgactcggtgatccacatggggtccccgccgaacagctcgttatactcgggcgtgcgcaggtggcgggccatgcgcagtttcatgacgaaatcgtccatcagctcctgtgcgccctgctcgctcaggcggccggcggccatatcccgctctaagtagatatcgataaacgtggcggtgcgccccaggctcatggcggcgccgttttgctctttaatagcgcccagatagccaaagtacagccattggatggcctctttggcattggcagcgggcaagctgatgtcgatgccgtacatggcggccatctcctttagcttgcccagaaagttgatctgctggtacagctcttcgcttagccggatgttatccacatccatcaggttctcaccgatgcgggccttgtccttttgtttttcggcgatcagcgcgtcgatgccgtacagggctacccggcggtaatccccgatgatgcggccgcggccgtaggcgtccggcaggccggtgatgacgccgctcttgcgggccttgcgcatctccgaagtatagacgcggtataccccgtcattatgggtggtgcggtaggtaaactcgtcttcgatcttatcggacaggcggtagccataggcctggcaggccgcccgcgccatgcggatacccccaaagggattgatgccgcgctttaggggccggttggtctgtaggcctacgatcagctcgttctctttatccaggtaaccgggctcatagctggtcagcgaggagacggtggtggtgtcgatatccagcaccccgccaaactcccgctctaccgtcagcagattttgcagccgtttcatcagggcctgcgtgcgctccgtcggcccggcgagaaaggatgcgtcccccgtataaggggtatagttggcttgaataaaatcgcgcacgtcgatgccatgcttccactgctcgcccttaaatccctgccactgattaaactccatccgtatagcctcctttggatatttgccctaaatcctttggcgcccaataaaaaagggcagcccttggatatcagggttgcccagacggtcggccttttacaagctttatgcttcactgtggtaacccacaatcatccgtcagtcacataaagcggctttgattaatctcagtatacgagagaaatagcaccactgtcaagcctgataaaacatttttgctattgataatttatatctttaaaaggtaaaaaggagatatatccaccgcttagcttccgtgcggagccggatggggctacggcaaagggagggggcggcatggtatccgcctgcaatataggccgggatgggaaagcaaaggggatataccggacgcagtaacaccttggcggggaatgaatatactgaggataggttcggtatagccgcaccgcgaaggtggcggcgcaacctaatctgatcctagaagtgagggtaaaaagaaatgtttgacagaaacggcttttatgtcaacggcaatggacggacgggccgcgtaaattggtgcagccgcccgggcctctcttgcagcagctgctcgccgggttgccggccaccttgtccgccaccttgtccgtcgccttgtctgcccccctgcccgccgggctgtgtagggcctaccggcccgacggggcccatgggtcctgggctggatgatgtgtatccctttgatccgaatgctacctatgacgcgggtgattttgttttctacaatggcgcgatctatcgcgtcaaccgggataaccccactggcactcccggtccctcgccggactttaccctggtaacggttaccggccccacgggcgctactggtcccactggtccgacgggtcccaccggtcctagaggtttggcgggcgataccggtgctaccggtcccacgggcccgacaggtgccactggtccccttggcccggccggcttaaacggcgctaccggccccgcgggcgcaacaggtgccaccggtccgacaggtcctactggtataggtgctaccggtcctactggccctgcgggtgcaactggcgcgacgggcgctactggtcctaccggccctgcaggcggtccgacaggtcccaccggtcctaccggagctacgggcgccactggtgcggaaggtcccaccggccctactggagctacgggcgctgctggtgcgcaaggccccactggccccactggtcctacgggcgctgaaggccccacgggtcccaccggagctgctggcgccgccggtgccgaaggccccaccggtcctactggagctacgggagccgctggtgcgcaaggtcccacgggtcccaccggagctgctggcgccgccggtgccgaaggtccgacaggtcctacaggagctacgggagccgctggtgcgcaaggtcccaccggtcctacaggagctgcgggtgctgctggtgccgaaggtccgacaggtcctacaggagctacgggagccgctggtgcgcaaggtcccacgggcccgacaggtcccacgggtccgacaggccccacagggacggttaccccggctgcagctgtaacggatgcgacaaactctacggatgttgtaacgcagttcaacacgctgttggctaacatgcgcgcagctggtttgctgagtacctgatgtataagcggtaagaagttatctttgaaggcagggcggcgcttatgtgccgccctgtttttgtatagcgcatgttagaatatcgccacccggatggcgaatagagtggatgcgtagggagggcttttatgaagattatcgtctatgcgatttgtaagaacgaagagaaatttgtacaaggctgggtggatgccatggccgaggcagatgaaatcgtcgtgctggataccggctcgaccgatgggacagtcgaaaaattgcggacgctgggcgtccgggtgacccaggaagtgatcaccccctggcggtttgatgtggcgcgcaaccgctcgctggaactagtggatgaggatgcggatatctgcatctgtactgacctggatgagcgctttcagccgggatggcgaaaagcgctgcagcgcgcgtggacccctggcacacagcaagcgcgttaccgctatacctggaactttaatcctgatggcagtgaaggcgtggtattttggatcgaaaaggcacatgcgcgcaagggcttccgttggactcatcccgtacatgaggtgctggagtactttggcgaggcgcccatgcgtcaggtcaaggccgtaggcatgcagctggaccatcacgcagaccccggcaaatcccgcgggcaatatctgccgttgctggagctttccgtggccgagtgcccccaggatgaccgcaatatgcattacctggggcgggaatacatgttccacggccagtgggacaaatgtatcgaaacccttatgcgccatttggccatgccgacggcccgctgggcggatgagcgcagcgcatccatgcgctttatagcgcgcagcttgcaggcaaaagggcaaacggaccaggcgcgggactggtacctgcgcgcaatcgccgaggcgccccacctgcgcgaaccctatgtggagctggcccagctgctctatacccaaaagcggtgggaaggggtggtgtatatggccgagtgcgcgctggctatcgccgtacggccggatacgtatatctgcgaggcctcggtttggggcagtttgccttatgacctggcatctttgggttattactataccgggcagtacgaaaaggcgctggagcgggcgcgcctagcagtagaggccgcaccgcaggatgaacggttgcaggggaacctgcgcctgatcgagaaaaaaatatccggttaaaaagagcgggcaaaagcgccgacggaaagctccggcggcgcttttgtatattgttttgagtttacagccggcctttaatcgggtgacatctgtaatgaatttactaaagatagtggcatgatagcggctacatatggtttaatggaagcgtaatcgcctaaggggtatcctgggcgtataggaggcgttgtggtatgaaaaatcgttctggcggtattctttggggcatagtgctgatcgtgctgggtgtgatctttatcggcaatatcagcggattatgggatttcagcctcttttttgcgggctggtggacgctgtttattttggtgccctgcctgatcgggctgatccagcatgggcctaatgtgggcaactgcgggggccttttggtcggcgcgctgctgctggccgccgcgcaggggtggctcagctggcagatgatgggtaaattgatcctgccgctgcttttgatcgtagcggggctggcgctgatcttccaaaacatgttcaaccgccaggcgcgcgtggtgcgcagccgccaccagggcgagatgcgggaatactgcgccatcttcagcggacaaaaagagctatacgcccaggaggaatttaagggagcggatcttacggctgttttcggcggtattgagctggacctgcgcgcggccatcattcaggaggatgtgaccatccaggcgacttctatctttggcgggtgcgatgtttgggtgcctgccggcgtcaaagtcaagctgagcaatacccccatctttggcggggctgaaaacaagaccaacaccgttccggcaccggatgcgcccacgatctacattaacggctttacgctgtttggaggcctggaggtaaaatgagcccgacacagagaaccatcaaatatatagccatggggctggggcttttgctggcgctgggcatcatctcggggatactaagcgccgtggttggtgtggccggatttttcagcggcgcgcaaaggagtgaacagcaggtgacgacacagatcgttagggattttgaggatattacgtctttggatgtttcccacgcggcgggtaaattggagatcaaaaacggagaggctttccgcgtggaggcctttaatgtggatgagggacgctttacctgccagcggcaggacgacggtacgctctatatccaggatgagagcatctatcacgcatttaatattttcaactggaactttggcggtaatgctacgcccagcatcgtcattaccctgccggcagatacccgtctggcttacgcctccatccatttgggcgcgggagagacgcaggtcgagcagctgatttgcgatgaactgaagctggagtgcggggccggctctttccgtgcggatcgcatggccgccgataaagtagatatttccggcggcgtgggcgagatacgcattgaaaatatggactttaaagatatgacggccaagaccggggtgggagaagtgcgcttaagcggcaggctgaccggcgataaccgggtggaatgcggtgtgggcgagctgcggctgaaccttgcggacgcgcgcagcgcctatgccatctccgccaaaagcggcctgggcgatatccgtatcgacggggagaagatctccggagagctgggcgatagcgccgacgcgccaaaccgcctgcgcttgcagggcggcgttggcgccatccgcgtgcagtttggccaggcggcggattggcaggcgaactgatgagaacaggagatgaggaggcagaacatgcaactggaggtcagaggcatcgataaacgctttggcgagcatcaggtgctgaaaaatgtatcctttaccgcccaaagcgggcaggcgctggggcttttagggcgcaatggcgcgggaaaaaccacgaccatccgcatcatcatgcaggtgtttggcgcggatgccggagagatattggtagatggcgtccccatccgtcaggcgcgggtgcgcatcggttacctgccggaggaacgggggctctaccccaaaaagcagatcttagagcagatggtctacctgggcgtgctgcgcggcatgcgggcaaagcaggccagggcagcggcgctggcctggctcaagcggttggaaatggacgcctttgccacaaaggcgctggacaccctctccaaaggcaaccagcaaaaggtgcagctggccgccacgctgatgcacgatccggagatcgtcattctggacgaacccttttcagggctggacccggtcaacgcccagctgctcaaagacgtggtgggcgagctgctggcggcgggcaaagtggtgctcttctccagccatcaaatgagctatgtggaggagttttgcgaaaatatcgccatcctaaacggcggccacatcgtgctgggcggcaacctgcgccagatcaagcggggatacgaccgcagcacggtgctggtccagtcgccggagcttgcacggctgaaagattatttaaggcaaaacgcgcaaggcttggtgttggagagccgcataatgggtgaggcactggcctgcaaattgcccagcgcgcaggataaagcacgccttttggcactgctggcccaaagcggcctggaggtagatggctttgcggtgtatgagcctacgctgaacgacatcttcgtgcagtataccgaggaggggctatgagcaatttttggaatatcatgaagtttgagctgcgcacctatctgacccgcaaatcctttgtgatcttgacggtatgcttggtgctggtgatgggcgcggtgctcttttacccgcgcatcagcgccggctttgccacagaggggagcgaggcggcgccaccgccggaagagcgtaccaccttggccctgcaggaccccactggcgtaggccaacaggatgcgctgacagccctgtttggcgcaggttttgcggatcagaatatcgcctatctcgacccggatctttcgctggacgagatcaaagcacaggtcgccggcggagaatataccggggctgtcgtactgctttcgcctacggagtaccgctatatcgtggacgacctgggcatgtacgacgcgaccactagcatagtggatgaactgatgacgcagttttaccggcaaagcgcgctaacgcagctgggccttacgcccgagcaggcgcaagcggtcttaaacgtgcagatcacaagcgagaccatccagaccggtaaggatcagatgtccagcttcttttacacctatatcctgatctttgcgctgtactttgccattttgatgtatgggcagtttgtggccaccagcgtggccaccgaaaagagctcccgggctatggaggtattgatcaccgcggcccggccgacacagctgatgtttggcaaggtcatcggctctgggcttgcgggtcttttgcaaatgacgctgatcttgggcagcgggtttgtgttttaccagctaaaccaaagcttttgggcggataacatgatcgtaacttccatctttggcatgccgctgagcatattgctctacaccatattgttttttgtactgggctttttcatttacgcctttatgtacggggcgctgggctcactggccacccgcacggaggatatcaacaccctgacgctgccggtcactttccttttcatcatcgccttttttgtgaccatgttctccatgggcaccggggcggtggataatccactgatggtggcctgctcgtatatcccgtttacctcgcctatggccatgtttacccgcattgccatgggcagcgtgccgcccggggagatcatcgcttccatcgcgatcctgctggtcagcacggtggccatcggctatctggccgctggcatctaccgcatgggcgtgctgctgtacggcaacccgcccaagccgcgcgagatattgcggctgctgcgccagaatatgaaaaaggcttaaccgacatttgagggacaacgacttagcgtaaatggactttcaggcagttggatggcgatgctttccggctgcctttttgttataataaaggtattgatgaatgagagggagcatgaaatggacgagcgctttgcacagataaaaagggaatgcctaaagtcggcatccaaagacccgttggcgctgctgattgaattgatgaataaggactatatcgccatccatgggccggagcatcacgtgctcgatggggcttgtctgctgaccgcgctgcataacgcgggcatggattttgaccttgaagcggccttggatgaaatgatcgaaaggggcagtaaaatgccgggggcgacctgcggacaatggggcgtttgcggttcggccgcctcgatgggggcggcgctatccatcattcatggcacagggccgctttcaggtggacaatactataaagacaatctgcgcctcgcctcgcaggccttagacaagatagcggacgttggagggcccaggtgctgcaagcggaatgcgtacctatcgatcctcaccgccatagactttgtatcccaccaatatggtataacgctccccaaaggggatattgcgtgtgcgttttcaaaacaaaaccgccagtgcatcggcgcgagctgtcccttttttaagggataaacgcgggggaaagcggcggcgttcttcgccaaagcgctttaacggcccgcggttttgtgatatacttgttgaaaataagtgaaagggttggggtctggcttatgctgacgcaggagaaaaaagcgtttatcgagtttatgatgggggcagatgtgctgcgctttggcagttttgtgaccaagagcggccgcaataccccttactttgtcaatacgggcaattataaaacggggctgcaaagctcaaagttgggcgagttttacgccgccgccattcatgatgctatcggcggggagtttgatgcgatgtttggccccgcgtacaaaggcattcccctggcgactgcggccgccggcgcgctggcacgcaattacggcatcgataagcccttcttctttaaccgcaaagaggtaaaagaccacggcgagggcggcgccattgtaggctataagccggtagatggagaccgggtgatcatcattgaggatgtgatcacggccggcaccgccatccgtgagaccatgcctatcctgaccgggtgcgcggatgtgcaggtaaaggatatgttcatctcggtcaaccgttgcgaggtgggggccaccccgggcaaaacggcggtgatggaggtaggcgaggcgttcggcatcagggtgcacgcgctggtcacggtgcaggatatctatgaatatcttgagcagcagggcggctatggcgaggtgctgccggccatggcgcggtatatggagcagtactgcatcttttaataaatgcagttggtgtaaaaagatcccgaggcgcattgcctcgggatcttttattttgggagttaggttcgtctctctgcttaaacgcctgcccgggcgatgcctgagcgctgagccaccttatagaccataacggagaccaggaacagcaaaatgctttcaatcggccacaggcaggcatttttgatgatccggtcgatgatcaaaatggatacggccttgccctgggtaaaggatagccagagggtattcagaccgatattgaccaccacgttgatcagcccctttgccgcgaaagagcgccaaagtttgatgggccgcttgtagagcacggtgccatagatcaacccgcccacgatggcgctgatggtaaagccggggaagtacccgccgctgcgggaattgatcagcaaaaaggacaggatgtcggtggcaaagccggtgcccatagccatggccggcccgaagagcatgcccaccatcgccgaggtcaaaaagccgaaacccaaccgcagagtaggggtaagctggagcgaaaaaaagtccagcacgatattgagcgcgataaacatggcgcacaacgtcagggccttgatggatttgtagtgggcggcggattcacgaaaacggcggagaaaatctcgcataaaaaaacacctcctaaaaatatgttgccacataacttaggaaggctccttcgatatgcagcagcgggatgcgacgcttgcaccgcaagcccgggtgggcttttcgttcggccggcaactccccgtccggctgacactttacgcgcaaacatctactctgcctcgttcacgctctattatagcgaaatgaggcgcaaatgcaaccattttatcaaaatgatcggctggatttgacgcaagggcaaaaccgtgtaacaatagataaagaaagaacgtgcgcctaaacccagagggagcgacgcatcctatacagaaagattaggccgttgggggacggtatgaaagcgcaggcaaaggtacacactaggcgtatggcttggaaatgcctgccacaaaggaggttaaagcacgcaatggagcagaaacttttctttaacggggatatcatcaccatgcgggaagagcagccctacgcccaggcattgctggtcaagggcggcgcgatcgcctttatcggctcgctagagcgggcgcgggagctggccggagccgaggcggaaatgatcgatctggagggcaaaaccctgatgcccgcctttatggatgcccatagccacatcaccaatgtggccaacaacttgcgggtggcagatctaagcggctgcaaagacgaggatgagatcatcctgcgcctgagggaatttgccaaggttcacgacgttgcggcgggggagtggctaatcggctacggctatgatcacaacgagcttgcaagcggcatgcacccgacctgtaaagcgctggatgcaatagacgatcatccggtgctggtcacccatacctcagggcacatgggcgcggtgaaccgcctggggctgcaaaagctgggcataacgcgggggacggcagacccgacgggcggggtgatcggccgggatagcggcggggaacccaacggttatctggaggaaacggcttttaccaaagtcagcgcgctgattccggcccccacgctggaagagatgatgcaggcaatggacgaggcgcaggagatatacctgaaaaacgggatcaccaccgcgcaggacggcatggtggtaccgggcaactttgcgctgctcaaggctatggccgacgcaggccgtttaaagatcgacgtagtagcctatatcgacctggcggagaacagcaggctgctgcgcgccaaccacccctatacccaaaactacctcaaccacttaaagatcggcgggtacaagatattcttggacggatccccccaggggcgcacggcctggatgagcgaaccctatgagaatgcgcaggacgggtaccgcggctatcccatttatactgatgatcaggtaaaggcgttttgcgaggtggcgctgcacgaaaagcagcagctgttggcccactgcaatggggacgcggccgcccagcagtatatcgacgcgttccaagcggctttaggggagatgggcgtgaaaaacgagatccgccccgtcatgatccacgcgcagaccctgcgacccgatcagctggacgagatgaagcagatcggcatgatcccctcctattttgtagcccacacctattactggggggatgtgcacgtcaaaaacctgggtcaagcgcgggccatgcgcatcagccctgtgggtaccacggtccaaaaacgggtgcgttataccttccaccaggatgcgccggtggtgccgcccaaaatgctgcacacggtctggtgcgcggtcaaccgcctgaccaagagcggccaggtattgggggaggatgagcgcatcagcccctataaggccatccagggcgttaccgagcatgtggcctggcagtatgcccaggaggataaaaagggcagcctgcaaagcggcaagctggcggatctggtgattttggaccgcaacccgctcaaggtggaaccgatggagatcaaggatatcgaggtgctggagacgctcaaagagggcaggacgctttaccgcaaaggatagaggccttgaaaagcggcttagaagctgatataatattaaggttgcaaaaggatttgtttgaaaaggcaaggactttaccgtccttgcctttttgtaggaaagagaggatcaatgcaaacggaaattcaaccaatggaacacaatgatacgcaggtgcaggcgggctttggggccgtcagcctttcgccagagctttcgcgcgcggtggaggcgatgggctacgagagcatgacggatatccaggccgcggccatccccgcggtgctggcgggcaaggacataatcggccgctcggctaccggcacgggcaagacggcggcctttggcatcccggcggtggagatgctcagcgcccagccgggcagcgcggcggtgctggtgctttgccccacgcgggagctggccatgcagatcagcggcgaggtggccaagtttgcccgttttaagcgggatgtacacctggccactctgtacggcgggcaggccatgcccatccagctcgaacagctgcgccgggccaactttgtggtgggtacccccgggcgggtgatggaccatatgcgccggggcaccctgaagctggatgcgataaaaatggtgatcctggacgaggcggacgagatgctcaacatgggctttttggacgatatccgtaccattctggcggacgcgccgcagcagcggcagacgctgttgttttcggccactatgccgccggctattttgcagatcacccgcgagttccagcgcgacccggtgatggtggcggtggacggcgggaaaaagacgctggatgccatcgagcaatattattacctggtgccgccgggccaaaagcccgacgcgctcaaccttctgttgcaggcccaccggcctgagcgggcgctggtgttttgcaacacccgccggatggtggacgagttggtggaatacctggtcaaaagcggctttaaagccaccgggctgcatggggagatgagccagatggcccgcacccgggtgatgcaggatttccggctggggctgaccaagattttggtagctaccgatgtggcggcccgcggtatcgacgtagaggacgtagaaggggtatataattacgatattccgcaggacgatgaatactatatccatcgcattggccgcaccggccgggcgggcaagcggggggctgcccacattttggcctgtaaccgggggcaggtgcgccgcatccgcgagatacgcaattatatccgcgcagatattaaggaaaaggccctgcccagccgggaagagattttaaatctgcgccacggccagcggatggataaggtgcgcgaggcgcttcatgagccgccccagccccaaaccatggaggcggtggaggccctgatacaggaggggtacgacgcgcgccagatcgcagcgacgttgctgagtatgatgggcgaaaaggagcggcgtatgaagctgcccaaggtgcgcgctgttacggcggccgaaaagcccgcccgcaagcctgtgcgcggccgggtggccctgcggctgaacctgggtaagcgtcaggacatggcgcctaactttatcgtcagcgcgctgtgcgacggggcggatatcgccgcccgggatattggacggatcgatgtacggggcgattacagcctgatcgagatgacgccggaggatgcgcgcaaggtgatgcgtaccatgcaaaagacccgcatccgcaataaccgcgccagctttacgctccaatccccgggcaaggaagcgcccgcgtacccgacggagcgccggcgcaagcgcacaaggccgctgcattaacacaagtttaaagccctccgctttagcggagggcttttttgtatgcaagctacggtgcagcttcaggccgcctcatccggcgcggcgccgatgctgccgtgcacccaccgacgggtgcggatgtagataaagcccacgacgatggaaacaaaggaggctagcggagcggctaggccaatgcccgtcaggctatccggccagaggttggaaaacagcagcgcaaggggaacccgcaccaaaaaggtggatagaaggccattgaccatggaaaaagtagtgcggccgcagccgttgaaaaagccgttcatgcaaaatacaaaggcgaccagcataaagtcataggaaaatgagcgtaaatactgtgcgcccgcctgggaaaccagggcgtccgctttgaagatagctaggatgctgaccggcgcgacctgggcccagatgaaaaacagcacggaacagccaaaggcgatggcgataccggcatacagggtcttttccgctcggcccttctccccggcgcccatgttctgggccaccatagcgctgatggctgcggcaaacgccgtggcgggcagcatggcaaaaccctcgaacttaccggctacgcctaccgcagccgaggcgatcacccccatgttgttgacgatagcggtaatgatcataaacgacaggtggaccagggattcctgcagggagatcggcaaccccagtttgagcaggcgagttgcctgctcccggtggatgcgcaggctttttagcttaaaatcgaacaaaaacgccctgcggcgcaggtaaacgatggcgatcaccatgctcacagcctgagaggccacggtggccagcgccgcgccggccgcccccatgtgcagcggccccaccaagagcagatccagcatgatgttgcaaacgcaggcgatggctacaaagagcatagggcttttggaatcgccaacgccgcgcaacacagcactgatggcgttgtagccaaaaatgaacaggatgcccagtgagcagatcaacacatactgataggcctgcgtaaaggcttgtgctggggtttgaagcaggctgaggatgccgccgcaggccagacacatgataagggtaaaggccgccgcggccacagcgaacatgcccaacatggtgccgatggtccggtgcacatcctgctcgcggcgcgcgccgaagtattgggcgataaggacggtgccgcccagggtaaggcccgatacaagagaagtgacgatctgcatcacctgtgtgccgatggagacggcggaaatgccggcggcgtcggtaaaccagccgacgatggccagatctaccgcgccataaagcgcctggataaaattggcggccagatagggcagcgcaaacagcgtaaggctttttacgatgctgccctgcgtcaacttgggctgtaaagtatccatatttaacgcatccttccaaaactgttttacataaaaaaatggacaaaaaagcaacgaagttactctcttatccagcataaacccgcggtatataccctccgagatcaaggggaattattcactttcaattaaactctacaatagcgtgcagcgcttgtcaaggggtaagacggttgccgggcggcaggctttacggtataataagaccgggtttgacaaagactgcccataaagggttttattggttaggatgataaaggagggagaggctttgcagcaggcgcaaatgaaaaagactctggacgactggttgcagacccccgggctctccggccacgaaggcgagatggccgaaaaggtgatggccgcctttaccgccgcaggggccgaagtatggcaggatgagctgatgaacgtatacgctgcggttggccccaagcaggggcggccgctggtcatggtttcagcgcatatggacgagatcggcatgatggtggatcgcatcgacgaagatgggttcatctttttttcgcagatcggcgggatcgatccgcgcatcctcccggcgcaggaggtgatcgtggagggtaaaaagcccctgtatgggatcattggcttaaagccgccgcacgtcaccacggtgcaagaacgcaaaaaggtattgccgattaacgagctggccatcgatgttgggcttgatgccgagcaggtgcgcgcgctcatctccccgggagaccgcatccattttgacgcaccgctgcacgagctttccggccgcacggtggccggacacaccctggacgaccgggccggcgtgttggcgatgctggaggcctgcctggcgctgcgggaggaaaagctgagctgccggatggtatttgtcgccagcgtgcaagaagaagtgggcacgcggggggctaaggtggcggcctacggcctgcagccggacatcgccattgccatcgacgtgacccatggcaaaacgccggatgccccggcagacctggtgttcccgctgaaaaatatcgtgctgacggtagggcccaacattcatcccaaactggtcaaggaggcccagcggattgcaaggcaggagaagatcgactacgagatcgaggtggaggcccacgtgacgggcaccgacgcggacccgttgcagatctcgcgcaccggcatccccacgatgctgatcgagctgccgctaaagtatatgcataccacggtggaaacgctggatctcaagacggtaaaggattcggccaagctgctgcgcgctatcgccactgcgcttggcaagggttgggaggcgaagctatgcttttagaggaactgtgcgccttaagcggcgtaacgggggatgaagggcaggtgcgcggctacctgcaggactatttaaagccttatgccgatcaaatgcatgtagacgctatgggcaatctgatcgccacccggcaggcgcaggacggtaaggatgcgccgacggtgatgctgctggcccatatggacgaggtgggcctgatcgtcaccggcatccgggaggacggcacgctgcgcttccgcccggttggggggattgatccacgggtgctgatctccaaacgcgtattgatcggcgagaaaagggtggcgggggtgatcggctgcatggccattcacctaatcgaatcccgagaagagatgtttaaggcccacaaggtggataagctgtacatcgacatcggcgcggcggataagcgtagcgcggaaaagctggtacaaaagggcgattatattatttttgacccgcgcacccgttattttgggcaggatatgtttaaagctaaagcgctggacgaccgggcgggctgtgcggtactggcccgggccatggaaaaacgctatccggtcaacctggtggccgcctttaccgcccaggaggagatcggctcgcgcggcgcgggcacggcggtatttggcgtaatgccggatgcggcgctgatcctagagggcaccacctgcgcggatatggcggggatgccgcagcacctgcgggtgacccggccgggccgcggcccagcgttgggcattacggatcatgcggccatcgtagataagagattacgaaattttatcatccagacggcccagcagtcgggcatcccctggcaaaaccgggagggcatctttggcggaacggacgcagggctggcccagcgcaccggcgccgggcggccggtagccaatatctcgatcccctgccgctacatccactcgccggtcagcgcggtgaacctgcgggactatgaagcagccgtgcagctggtgcaggctgtactggaacgcatggacggatattttaaggaggcttaaaggcatgaaagaattattggcgcagttgtgcgcggcgtttggcccttccgggcgggaggaaggcgtgcgtgaagtgatccgcacggcagtggcgccttattgcgataaagtcgaggtagatgcgctggggaatctgatcgcctacaaggccgcttccggcaaggccataggcgaggcgccccggctgatgctggccgcccacatggaccagatcggcctgatcgccacccatattgacgaaaagggctatgtgcgctttgcggctatcggcggggtgtcgccccgcaacgcgctgtaccgcaccgtgcgctttgagagcggcgcgcagggcgtggtgggcgtagaacagttgaagctggactatgccaaactggaaatttcaaagctgtttgtggatatcggcgctgcttgccgggaagaagcggaaaaaatggtgcaagtaggggatatggcggtgtttgaatccacccttatggaaacgccgacgcagtatgtctccggcgcgctggacgaccgggtatgctgtgccatgatgattgaagcgctaaaaaaggtgcagaacaatgcaatggaactggcctgcgtctttaccgtgcaggaggaggtgggcctgcgcggggcggggcccgcggcctttgccttaaagcctgcggcggcgctggcgctggatgtgactttgagcggggacacgcccgaggcggcgccccagtccacccacctgggcggcgggccggctatcaaggtcaaggatcactcggtgatctgccacccgcagatcgtagagtggatggaaaaggtggctaaagaggcaggtattccggtacaaaaagaggtgttgactgcgggtggaaccgatgcaggcgccatccacctgacccaggcgggcatccgcagcggcgcactctccttaagcacgcgctacgtgcacagtcaggccgagtgcgtatccaaaaaggatctggagcagagcgtggccctgctcgcggcactgatggagagcagcatctaatataaatcgattaaggagaaggtttatgaaattactgatcactggttgcaagggccagttgggccgccagttgcttaagattctgcaacaggggcatagccagctgggcgaactgccggcggcatacgcgggttgtgaagtggcaggcattgatttagaggatctggatctaagcgaccttgcagccgttaagagaacgcttgaggattgtaggccggatgtggtgatcaactgtgcggcttataccaaggtggatcagtgtgagatagaccaggacgctgcctacgccgccaacgccttggcgccgcgtaacttggccatggtttgcgatggattgggggctaaactggtgcaggtctctaccgattacgtgttccccggcgttggcaatgtgccttaccgcgaatatgaccggcccggcccggttagcgtatacggcaagaccaagttggtgggcgaggaatttgtgcagcggttttgcccgcgcagctttgtggtacgcaccgcttggctgtatggggatgtaggcggcaattttgtgcgcgctatcctgaaacgggcgcgggaagagggaaagattcgggtggtagacgaccagcggggtaaccccacctatgcagaggatctggcgcaccatctgctactgatcgccctgacggaggaatacgccatttatcattgtacgggcagcggcgagtgcagctggtatgaatttgcctgtgccatcgtggaagaggcgggcgtgccctgtgaaaaagaggcgatcacaactgctcagctggggcgtggggccaaccggccggcgtattcctctttagaacatatgatgctgcgattgacggtgggcgaccggatgcgcccttggcgggaggcactgcgtgcctttatcgcatcgcaagaggtgtagtgcgatgaaggtaagcgtagtcatccccaattacaatggcgaaaaatttttgcgggagtgcctgcaatccctgcgggaacagagccagccccatgaggtgatcgtagtggacaacgcctcaaaggacggcagctgcgcgctgatggcgcgggagttcccggaagtgcgggtgctggtacaagaagaaaatctgggctttgccggcggcgtcaacgccgggatacgcgcggctaaaggcgagtatgtggcgctgctcaataacgatacccgggcggacgagcattttttgcgcgccctggtgcgcctgatggatgcgcaccccaacgccttttccgcctccagcaagatgatccagtataacgatccctcccgcattgacgatgcgggggataccctgacgctgatgggcgtgcccgcgcagatggggcacggggccaaagccacgcgctataagcgggaccggcgcatcctttcggcctgcggcggcgcgtgcatcttccgcaaatccatattggatgagatcggcctttttgatgagcggttttttgcctattgcgaggatgtggatattggcttgcgcgccctggtgtatggataccgaaactggtactgcgccggttccatcgtctaccactacggcagcgccacttcagatgcgatctccaagggcaccagtgcatttcgggtgcgcttgagcgcgcgcaactgccttttgatgctgcacaaaaacctgccgcccttctggctcaagctgcataagcctttattggccctgggggcgcgccgccagcgcaagggttaccgggcgtgggggcaggagaaggcttatgaagaaggaatcgccgaggccagggagctgatgggcagctttgaacacagctaccaaaaggggcgttatcataattactggtatatcgaaggactgatggcggtgaccaccatcccctacctgggaatggcgctgcgccggcggatgggcaccctggtcagtcgcctggcgccgggcgcatggaaaaagtgggaagagaataaatagccctgaaaagaaaccagccgtgcattttgcacggctggttttctatcggccttctttacgcccttatcgccaggcggccaggtttttgcgcacaaactggcgaaaggtctggggctctttccccatcacctgctcaaatacggaggtgacctgcttggcgccgcccttgcgcgtcacaaaatatagcatgcccattacggtggcatactcccgctctaacccacggatgtcgatccaatagcgcttggccagccccggcctagggttggcgtagacgatcgttcggcttaattcttcagagagaatgcgcgccgcttgatgataatcgatagcttccggcccagtgatggaataggctttgttgcggtggctttccggctcgcatagcactttggcgataagctggccgatatcctcggcgtcgataaagctggttaccgcgtttttggcgggaatgacgatccggttaaaatgtttgatctcaaaagcgtgcacgccgctgatgttctgcatgaaaaagctgggacggatatggcagtagggcagacccgcctgctggataaacttttcgattttgtggtgcgggggcatggggttatgctccacccccagcagagataaaaagctgaccagtctcactgtacccgcacttttcaacgcgtcgataaagggctttatatcctcgggcttgcccagatgcgggggacgcatgataaacacacgatccgctccctggagagcggcagggaaggtgccaggatcggtaaaatcaaaggggacgcattttacgtcctgtccataccgcttttgcagcgtctttacgtcgatatccgcaagggtgacggactgaccggcggcgatgagatacttagcgacgtagccgcccacgtttcccagggcaccggtcacgataatattagccattttgtcgctcctcctctaaaatcaaattagcctggtcgatcagcgcgatcaaggacgaaaagcgatcttctcccattttctgctgtagcagctgcatggaactgtaataatcccggtaggtgctctcgaccaaaagcccgcccacgcgggtagggcgtaatatgaagctgcgccggtccttttctgatggtattttttccagatacccttgttgcgctaaagagcgcaccatagccgtgaccatgggcttggatacgtgaaaatagttggctgccatggctggggtaaccgttccgttgcccctgtctgctagatcaacagccccatctcgctgttacggatgggcagatcccgctttccattgagcatcagacgggagaaaagcgagatgatctgctcgccttttatcgccagagattccatttgcatatccgccttttaatatttaatctaatgaactatattatagttaatttgatgaactaggtcaaggctatacctgtctttatcaataaaaaaacagccgtgcagatgcacggccgttttttgtcctttcctacggatggaaaatgaccttgatcgtctggcggctttgcatcagacgcacgccctcgtggaaatctttcagcggcaactcgtgggtgatcatggggcggatatccagcttgcgcgcctcgatcaggcggatgacgttgcgccaggaggtaggattatagcccatgtgtcccaccagcgagatgttgcggtcagtcatggtggtgatctcgtggttcagcggatgctcccagtcgtaaccggtcattacgatcttaccgccgttgcgggtgatctccacacaaagagggaaggtggaggccggcccggcgcagttgttggtgatggctacgccttcgccatcggtcaggcgcagtacctcggcgcgcgcatcctgggtatcggtctcaataatatgggtagcgcccatcttgcgcgccgcctcgcggtgtagggcgctggtggaggcgcgtaccagagcgatcactttggaggcgccggcggcgctggccgcgccgataccgcctaatcccagcggccctacacccatgaccgcaacggtctctccggcgatcagcccaccccgctggatgatggcgttatagccgttcgaaggcggatccaatatagctgctacttccagcggcatatcatccggcacgcgccacagacagttggggaagggggagagcgcctgttcggggatgcgcacgtattctgcaaaccccccgtcaatggcgccgcccagccccagacgattggggcattgcaggtattccccctgcatgcaggcgtagcaactgccgcaaacagcgcctgtgttatccgataccacccggtcgccctccttccagcgggtgacccggcggcccaccgcggccacggtaccggcaaattcatggcccatgatcagcggtacagttttaccgctgccgcgccccatatatgtgttgatatccgaaccgcacagccctgcggaatgtacgcgaagcagcacgtcgccctcgccgatctgcggaatgggtacctcacgcaattccacttcgcccttgcccagaccatagcgcactacagagagcatctttttatcccccttattttttaactaaatttgcgaacttggatacaatacgttgacaagtctattatagaatagaaaactggaaagtggaacgcctcgagaggggccattttaagaaagctttaagaaactgcaccctttccccttaagaaaagtatgggaaaatagggttgtggctttgagggttgaggtaaaatgacacaaacaaagacgttgggtgggtttgaaaaaatgcgaattctagtctgtgacgacgatagagagatcgtagaggcgatcgccatctacctgcgtgccgagggctatgaggtcgtaaaggcctttaacggacgcgaagccctttcggcgctggaagaagagccggtgcagctgattttaatggacatcatgatgccggagatggacggtatgcgggcgacgatggccatccgcgaaaaggagaacatccccatcatcatcctgtcggccaagtcggaggatacggataagatcatggggctgaacattggcgcggatgactacatcaccaagccctttaatcctttagagctgatcgccagggtgaaatcgcagctgcggcggtatacccggctgggcagcttaccgccggtaaaaaaggacatctttaccactgggggcctgagcattgacgatgggaaaaaactggtgaccgtggatggagagccggtcaagctcacgccgatggagtatggtatccttaagctgttgtgcgagcaccccgggcaggttttctctatcgagcagatctatgaaaacgtgtggaatgaacccgcttacaaccccgacaacaccgttgccgtacatatccgcaggattcgggaaaagatcgagatcaacccaaaagagccaaaatacctgaaggtggtgtggggaattggatacaaaatcgaacagctggaaagttagtccatggctcaaattcacggcgatgctggtggcgctggcctgtgtagtggccatctacttttggatcctggcgggaggcgggatccaatctacctttcgcagcgaggactatcgagatagcggagcttattcgcaggctattggggatataagcaaccagatttcctccattgtagagaatcgcatgggggaccggggctatatctggtggaaccagcagtggcaaaattttgatatgcgaatggaacagctccagcaaaagtatgaccagctgatcgaggctggacaggggaacagcgccctgttcagcggggagctgcaagatacccgggcggctatcgacgcgctgcaaagcgagtgggatgaaaaggtgaccgcgcgcaaagccgatatccgcaaggcctttgtggacagtgccgatcaaatcaagtcgctgtgcgcacagcactattacttccgcatcaaggattcggatggactgatctatagcaatatggaggcgttagacgaccagcaggcccaggagatcctgcgcaccgggggcgagatatacttccttttggacggcggttattattggagcattggcgcaagccagcccgcgggcggcaatacataccagtattccacctcatcctatggctacagctcgaaccagggcgacctgtgggtggagatcgccatgacgccggagttctttcaaacgagccaagcggcctacgagatagaacgccaggagatggcggtgcagcaatactatgttatcccggcattcctcctgctgtgcgcggcacttgcctacctggcctgggcggctgggcgcaaaggcgcaggcgagagcgtggtgctgaccagctttgacagcccctatctggacctgggcgccttagctaccgcgggggtttgtatctttggtatgctgctcatgcgggactttggccgccagtattatatgcagaccccgccgacctttgcgttgatttgggcgctggtggtgatgggaggcgccagcgcgctggccctgtggttttgggtcacgttgtggaagcggatcaagcgccgggaggtctggcggcatacgctgagctgcaagatcatttgctggtttaaaaaactggcgcagaaatggcgcgaggtgtataatgggcagccccggcagattcgggtgatcctggcctttgtggccgttggcattttagagatcattgtgctgttcatgctcaatagctttttaatgttgctggcgctgatcgtaaccgcggtggtgctgtttatccacctgcgtaacgagcgttttggccaggagctgttggatggggccgagcgggttcgtcagggggatttctcccagcccatccccgaggagggccccagagaggtcgccgcgctggcgcagaacatcaaccacatcgccgagggctttaaggccgcggtggatggggaggtgcgggcagagcgcatgaaggccgagctggtgaccaacgtttcccacgacctgaaaacgccgctgactagcatcatcgcctatgtggacctgctgcaaaaagaagagctgcataatgaaaaggccagcgaatatgtggcggtactggcgcaaaagagcgcgcgcctgaaagtgctgacagaagaactgtttgaagcggcaaaggcggccagcggcaatatcgaggtacatctggaaaggctcgatatcaacgcgctgctgcgccagggcgtgggcgagctgcaggataagatcgaccgcagcggactggactttagaatctattaccatgaagcgcctgtttgggtggaggcggacggcaaactgctgtggcgggcgatggaaaacctgctggtcaacatcgttaaatacgcgctaccgggctcgcgcgtgtatgtccgtacctatctggaggatgggaacgtcacgctggagatgaaaaatatctcaaaatatgagttgaacattccaccagaggaattgatggagcgcttcaagcggggtgacgcctcgcgcaataccgagggcagcgggctggggctggctatcgcgcgcagcctgatggaactgcaaaagggccgcctgcttttggagatcgacggggacctgtttaaggcctatttggttttgcctcagtgcccggaacggcctgcgccggagcagccaaaaagagaggtagagcgatagcctgcgcgcgggcgcaggttgggtcctgggccccggcgtttcaagcactgccaaaatatgatatactaacttaagaaaacgacagcggagaaaaggttattatggcactgttcaaaagaagagggatcatcagaaggctgctgggatggatcctgatcttgattctgatcctgggcgggatcaatctatatgtgatcttcaaggtcaaagggcgcatcgtgccgctggagcaggcggccggcatcaaggctgattgcgtgttggtgctgggcgccggcgtgcgaggagatggagcgcctacccccatgctgaaagaccggctgacccagggcatcgctctctatcaggtcggcgccagcgaccggctgctgatgagcggggaccatggcaccccggagtacgacgaggtaaacgccatgaaacagttcgccgtcgacagcggcgtcccctcggaaaaggtgtttatggaccatgcgggcttttcgacctatgaaagcgtgtaccgcgcgcaggccgtattccaggccaagaaggtgatcatcgtatcccaaggctatcacctgtaccgggcgttgtacgtagccgacgccctggggctggaggcctatggcgttacggcagacctgcagccctaccaggggcagtgggcgcgccaggggcgggaggcgctggccagggttaaagacttctttttcggcctatttaaaccagcccccacttatctgggggaggctattcccgtcagcggcaatggggacgataccgcgggataaaaggtacagtaaaaagcaggcagcttgagctgcctgcttttttaggtttaaggtgtttacgaagcctttttgtctgaggagggcgttccctgcacatacaacttttcatcacgcctgcctaagcgatgcccatgcgataccagtagcgcccggaagtccggcagggcagcgcggccttcgtcagtaacgggttttaaccagcgcccggaattgacccgccacagcaccacgccgaaccgcaccacgtcgtccagatacatcaggcagtacatcgccaaaaaggggaggtgcagcgccgcgcccagccccagcgcggggagggtaaagctgtataggcagacgatctccaaaatcgtcccaaaggatgaatcgccgccggcacggaagcaatcgttagagatccagttgcacgagcgcagcgtggcgaataccgtatagatcgccaggatgttcatcccgtagtagagcgcctcaccgcttaagctgaaaaggcccaacaggccggcgcggaagggctggatgagcaggcagaccagcagcgtcaccgccgggcagagcagcacgaaccgcttggcatcggtatatccctgtagatggttgcccgagcccacctgtttgccgaccatgacggctgcggcgctggtaaaccctctgaaaaacgcaaagaccagaccttccaccacccgaaagactgccagcgcggccaaagcggcggcgggctggcggccgatgatggcgttaagaatcatattccctacgcccatggctgcttcattccccacgataaacgagcttttggcaaaaaactgctttaaaaatgccttgttccagcggaaatgctcgctgaaacggaacagataagggtttcgatcccacaggcaggccacgacgatgaaccccagattgaccacgccagagatcagcgtggcaatggcagcgcctgcaatgcccagggcggggaagcccaactgcccgtagatcaatacccagttgagcgcggtattggtcaaaagcgaggcgatagaagcgtaaaggggtatgcgtacccgctcagtggcgcgcagcagggcgctcatcccataggccagcacctgaaggggatagttgaagccgacgatgctcaggtacagggcgccggcctgctgtatgggcgctttatccgtatagacctgcatgatggcctggggcgccagcaccgccagcgtgccaaagagcaggccgaaaaacatcatacagctgatcattaggccataagtccggcagatgccctgtttgttgttggcgccccaatactgggccacaaagatcacgccgccgtggcagaacccaaaataagcgctgaacagcagggacatgaactgtgcgcacagccccacggcggccaccgcggtttctccctgggtgctgatcatcagcgtatctacgatgccggccgaagagatcagcagattttgcagtgccaccggcaggccgatgcgcagcacgccatcgtaaaaagtccggttcccgagcaaaggggtcttcatcccacataccctcctaatgctttagcgccggagcgctatcaaaacgttttgagaccagtaacactaccatagcaagaatggcgggcaaagtctagcatttatgtctgcttatttatgctttatggcgattttaagcaagaaaaagggcgcggcgaccagccgcgcccttttgtgaaagctgtcactctcccgccgccacccgaaccatggcctgatggtcggaatccttcatattgcggatatgggtcttactgtttaaaaagtggatacatacctgcccggtcatcccattatcgggtacggtttcatacccatggggcatgccgttggtagagccggccacccaggtatccccgatcttgaccagcaccggccgccggttccaggcccaaacgccgccgtagctggccttcaaacgctggcaatcctcctgggtagcgggctccacatcggcgtggttgctgccgcccacccgcaccatggtgtaggtaatgccagtccacacatctttaaccagggcgctgcctccccgggggaaggccccctctacctgggtaaaccaatcccacttttcgccggtctgcaccgcggcggccgcagcctcagcagcctgcgcgggtgtcaacttcggcgctttgggggcgacggaacaaggcggcctgcgtttagcggcattgctatagagaaaggccgcagtctcggggcccacggaaccatccaccgtcaggttgttggcatcttgaaaggcgcataccgcatccactgtgagcaggccgtaatagcccgtgattttgtaattataatagcccagatcccgcaggcgcatttgcaggttcaaaacgccgtccccctggctgccgttattaaagatctcctgctgtacctccggcgcggccgcggcaccgcacggaaaggcgtttatcacgcccaggcataaaagcagcgccaagctgatccacctttttacagcatttttgcgcacgccgctgcccccctttgttttacttcttctcacgtcattctatcacgccttttttaacttatgcaatcccctgtgaaagtatggacagcgacgcgataaaagggatacaatatatacatgtatggctatagaccataggggatagaggaggcgcaaaaatgcagtgtggctgcccccattgtggggatttgatggcccaggtacccaagggcatgaacagctattgcatctgcccgcagtgcgggcatacctgcaacgcctgcatgggcacgggccagagcgtgcgtgcacccaaggtaggtaaactacagctctcccgcgaactgcgggagtaccttgagcatgaattcgacggcgaggtttgactttaagaaaagaggaggaataaaaatggcgctacttacgcgcgcgtacttaaaagagcatactccacagggcatcgcggtagggtcactgaaacaatacccggagaaggtgctgcagatcggcgagggcaactttatgcgcggttttgtggattggatgatcgacgggctgaaccggcaggggctttttaacggcagcattctggtggtgcatcctacgccccggggccacgcggcgcagctggatgcccaggatggattgtattcgctgatcctgcgctcgcgcatcgatggccaggtgcgggacgaccgccagatcgtgaccgctatcgaccgggcgctggacccgtatcagcagtatgaggcgtttttggccagcgcgcgccaggaggagatgcgctttattttctccaataccacggaggccggcattgcctacgtggcgcaggccaggccggatgcctgcccggagagcttcccagctaagctggctatctggctgtatgagcgctaccaggcctttggcggtgcacaggataagggaatggtgatcatcccctgtgagttgatcgaacaaaacggacagaaactgcgggagatcatcctgcgccatgccaaggattgggggctggaatccggctttgaaagctggatcacgtctgcctgcacgtttttggatactttggtagaccgcatcgtcaccggctacccggctgccgaggcagagagcctgcaggccgcctggggctatgaggaccgcatgatcgataccggcgagatcttccactttttcgccatccagggagacgcaagctgggatgaggagctgccgctggtcaaaggcggttataacgtggtgtggactaaagatgtggctccataccgggatagaaaggtccgcctgttaaacggcgcgcataccatgagcgtgctggccgcttacctgggcgggctggatatcgtaggcgagatggtggccgatcaggactttggcgcttttctgcgcagcggcctttatcaggagatcatcccgggggttgcgttaccgctggaggaaaaaaagagttttgcagacgcggtactggagcgcttctctaatccttttatgaaacataagctgttggatatatctttaaattcggtatctaagtttaaggtgcgcaatcttccctctatcaaggcggcgctagagcggggagagacgccacgccggctcttgctggcgctggccgcgctttttgccttctaccggccggccaggcaggcggatggcgcgttctttggccgccgcgcaggaggggatgagtatcctatcagggacgatcaggagatattgcaggcttttgccaaagcttgggaggcgtatgacgccgatgctgatgcaggcgagctggtccgcgcgctgtgcgcccgtgcggatttctggggcgaggatctaacccaactgcccggcgtgatagcgggtgtgaccgagcagctgcagaccatactggataagggcacgcgtgcggcctgcgtggcgctgaaataggaggccctatgcaagattttatccgcatccacccgcaggacaacgtggcggtggccctgcaggcacagccggccgggcagagctttatgggggtaacggcgctgcaggacattcctgccgggcataagatggcgcttaaacccatcgccgcgggggaaaagatcatcaaatacgccagccccatcggcgtagccacggcggatattcccgccggcgcgtgggtacatacccataacgtaaaaacactgctggacgggacgctggaatacagctatcagccgcagccttcagcctttcaccatcagaataccgggcgcacctttatgggttaccggcgggcggacgggcgcgtaggcatccgcaacgagatttggatcattacgacggtgggctgcgtcaacacgtcggctgcgcgcctggcggaaagggcgcgccagcgcataacaggcaccagcatcgagggcgtctatacctttccgcatccctatggctgctctcagatgggggaagacctgaagcttacccaaaagctgctggcggcattgtgccgccaccccaactgcgcgggcgtattggtgatgagcctggggtgtgagaataaccacctgggcgtgtttaaagaggtgctggggccggtggatgagaaccgggtcaaattcctcatcgcccaagaggttgaggacgaagtggaagcgggcctggagctgatcgatgagatgatcgcatctgcccgggaggaccggcgtgagcccatcccggtcagcgagctgtgcgtaggccttaagtgcggcggttccgacgggttttcgggcattaccggcaaccccttattaggagatttttcggaccggctgtgcgccgcaggcggcactacagtgatgaccgaggtgcccgagatgttcggcgcggagaccctgctgatgaaccgggccaaggatgaggcgaccttccataaggtcgtggatctgatcaacggctttaaggaatactttatccgccacggccaagtggtgtatgagaatccctcgccaggcaataaggagggagggatcactaccctggaggataaatcgctgggctgcacgcaaaagggcggctcttcccctgtggtagacgtgctgggcttgggcgagcatgccaaagagcacggcctcaatctgctggacggcccggggaacgacctggtggccgtcaccatgctgacctgcgcccacgcgcacctgatcctgtttaccaccggccggggaaccccctttggcgcgccggcgcccacggttaaagtggccactaattcggccatggccgcccgaaagaaggggtggatcgactttgacgccggacttctgctggatgggcatagcatggatgaagtgggcgcagccttttttgactatattatcgccctggccagcggggagacagaaacccgcgccgagcgcaacggctaccgggagatcgccctgtttaaaggcggggtcacggtataaagcgctttttgaatcgaatataaagagagataaagcaagaaggagtggagaaccatggctgtattacaaagcaaagaggcgatttgcaaacgggtggatgaggctgtgcaaaatgtttgggtgaccgatgtacatacccacctttacccgccgtcctttggggacatcctgctgtggaacgtggatgaactgctgacttatcattatttggtggcggagaccttccgctatatcgacatggattatgacgctttttgggcgctgagcaagcgcgagcaggcggatctgatctttaagacgctgtttatcgaccattcgcccatcagcgagagctgccgcggggtgctcacagtgctgcaaaagctggggctggacccggcaagccgcgaccttgccgcctggcgggagtgttttgaccaactgaccgttgaagactatacggacaaggtgtttgaactgggccgcatcaaacgggtggtaatgaccaatgatccctttgatgacctggagcgcccccactgggaaaagccgcaggcggacgcgcgctttttagccgcgctgcgcatcgatcagctgctgctgcactaccctgaaaactgggagaagatcaagggctggggctatgacgtggatgcggaactctctattaaggccgtgatcgaggtgcagcgcttcctccgggattgggcagtgcgcatgcaggcccagtacatggccgccagcctgccgccgacctttaaggtgccggataacaccctttgcgcccggctggtggagcaggcggtgctgccggtctgccgggagatgaacatcccctttgcgatgatgatcggcgtgaagaaactgagcaaccctgacttgcagttggccggcgattctgagggcaagggcgatatcgatacggtggagtatctgtgccggacctatccccacaacaaattcctttgcaccatgctggcaagggagaaccagcacgagctggccgttgccgcccgtaaattccgcaaccttctggtctttggctgttggtggttcctgaacaaccccagcctcatcgaggagatgacccgcatgcgcattgaactgttgggcttgagcgttgtgccccagcacagcgatgcgcgggtgctggatcagctgatctataaatggacccactcgcgccggatcatcgccaaggtgctgcgggataagtattgcgacttgtacgataccggttggcgcgtaacggatgaggagatcgatcgggatgtggataaactctttggcggcgcatttgacgatttcctggccttgcagctataatagagcggcatgcgttaataaagaaaggggcattgtaaaatggcaaaaaatcctattgtgacctttgagatggaggatggcggccgtatcgaggcggagttgtaccccgaggtcgcgcccaacacggtcaataactttatctccctggtgaaaaagggcttttacgacggactgatcttccaccgcgtgatccccggtttcatgatccagggcggctgcccggatggcaccggcatgggcggaccgggttacagcatcaagggcgagttcaaactgggcggcgtggagaacgatttgaagcacacccgcggcgtgctctccatggcccgcgctatgatgccggattctgccggctcccagttcttcatcatggtggcggatgcgccccatctggatgggcaatacgcggcctttggcaaggtgaccaagggcatggagcaggccgataagatcgtcaaccagccccgggatatgcgcgaccggccccatgaggatcagcgcatccgcaaggctacggtagagctttttggcgaaagctatccggagccggaaaaggtcggagaatagtctatttacagtataagtaaaaaggcgctgccgcaactgcggcagcgccttttatacaactaaaggtcgtacaaacttaaaatccaatagaagtaaaaaagaggtaaaaacctcttctttaccgatactaacattttttcaatcctcaggccaaaatgaccgacgttaaaattatagcacagtagaataaattttgcaccctgcgtatagtttagatccattctataaacaggtttcctggtgataggagtacaaaggaatttgacaatgaatgtgtacggaaaattaatggatgactagcactgcaagcgttaataaatgaactaaaaaagagcaaaactccattagatcatggaagctgatagtttctttcattaacgcaacctcctttctgcaattgctgtcgatttccgaggtgcccgcccttttgcaattcttgagaccattatagcatgtaaacataagatgagtcaatttaccatactaacattgaattattaattttatttggtttaggatatatctctatggagcatacctccgactggttgtttctatattgccggagaaagtgacagggtatgcgagcatacgaggtagttttattggaaattttgcgctatatatttttgccttattgtcaacgaaagcgggcaagctcctctggcgtcgggggctgaaaaacgcggatgtaagcgtccatctcagtggtaggaatgtagaatgtcccctctggctgcaagcggttgcgttcatccaaccgccggtatagttcatctatgggcacgtccatataatgcagacggcattgggcgcccaggctaagagccatatgccggagcgcctcgcgttcctgcacggcccaaaagccaaagtctaaaataacgttacatcccagcatcagcgcttgccgtgccacatccagcatgatggcttcgatctggctgtgcttacgatcatgatcgggatgtcccgcatcattgtcgaacagcttcagataccaggcgtctggcgtgagcagcagagcgtttgccgtagcggcaagcctgcgggcgtaagtagtcttgccgctacagggcagacctaccattaagtgcaatacagccattatatcctccctggggcgtacatagcacaattcaagtttaaataattgtaaaaacctataggacgattggtctgctaatggcggataaaaaacggacgccgcagggcgtccatttgtttactcgaattttgcgcaggccgtggcaaagttgcggatatctttccacagcaatgcgccccacatgggtgtgcgctgcatatgacagattctgcggttttgcagatcggcgatcacaggcagctcaaaggccgcgtagtgcttgggcggaatctgcagcgccagatcgactgcgtcctgtcctactacattgctggcggcgatggcgaagctgcctacgccggtctggaagccgcgcggcaggccctgatatatcttgagggcatgcttgatgcaggcgtcggaataggtgcgcagcgcttggacgtccaacttttcaaaggcggaaaggaaaacatatttcttcattttagaggcgccccatttgatgcgaaattcctctgaataatacatccaggcgtttagctcaggcacgaactggccgatgcccaagcgcccttccagcagcgagcggtaatcctcaaaaggcatggctccattagacgtcgcctgggtgatagggctaggctgaggaaagggctccgccggttgtggtgcaggctgggaagcggcggtgctgccctgtgcggccgtgccacaagccgggcaaaacttccctccgtcggggatctgtgttccgcatttataacaaaacatccttaggcctcctgctttcgatttggattatttgtatattctcattataacccggtggggaaagggaatacaacccgtaatcagtctggaaagcagagcgagcggtatacggttacaccccaactcttcttaaaaacgaaagaccgacctaaagattagataaagtgccgcatttatgttacaatagaacacaatgggtggggaggttggggaagtgacgaaacggatacttaaaattctctatgcgatagagaattgccaggtgctaagcgcgatcaaaaaaggattcttattgatcattcccatcgtgctgaccgggtcttttgccttgttgctgctcaatctgccaataccggcctatcaaggctttttagaaagcctttgcgacggccttgtgccggttcttttacagttcatcattgattccactaccggttttttatccctctatttaacgctggccatcagctatttttatacggcgccctttgctggggaaaactttgtcgtgcgtatcgtggccatggtttccgcctgcgcctgtttcatcgtatccctgggtggggagagcggcacgctgtcgctggaaagctttggcaccatcggcgtatttacggcaatgctttgcgctatcctcgccacacgtctgttttttgcgcttaaccgcctggtttaccgccgttaccgctcctatgcggctggaaacgatatccatttccgcagctctatggcggcaatattgccggtggccgtttgcgttacggtgtttgccctaggcaacctgctgctgcagatatgcttccatgagggaaacctcaacgatttgatcagcgggctgcttttccgggcctttggcgggctgcgctatgagccggcaaacggtttagtgtttctctttttattggatctgctttgggccctgggcatccatgggggcaatgcgttggacccggtggcgcaaacggtatttgccggcgcgggcgcatcgaccacggtgatcaccaaatcctttttggataactttgccgtgatcggcggcagcggcgctacgctctgcctgctgctggcgatgctgatcgcctcgcgccaaaagggcaaccgccagttagcctattcggctacgccgctggcgctgttcaatattagattttggtcttcggcctgcctatcgtcttaaatcccatactgttcataccctttatcctaacgccgctgctttccatgctggtggcctatggggccgtgatgctgggcttgatgccggtggcgacccaggcggtaaactggaccactcctgtgtttttcagcggctacctggccaccggctcctttagtagggtggtggtgcagttggtgatcgtagcgctgggcacgctgttatatatcccgtttgtgcgcctggccgagcgcatccaggaagggcgggaggactatttgatcggcgagttgacccgggattatcgcaaacggatggaaaacggcgaacacatgaattatttagagcgctatgacagcctggggatcatcgccaaaggcctggcctctcagctgcgcgcggacgtggatgccaacaggataccgatgtgctatcagccccaggtcaatgcgcaggggcacgtgatcggcgcggaggcgcttttgcgctggcagtataatggaaagccggtttttccgccgctggtcgtcgcattggcgcaggaggacggctgctttcaaaaactgacgtggtgcatattggacactgtgtgccgggatattgcgcccctgcgagaacactttggccccaacatccatgtttcagccaatatcgtcgcccaacagttagatgaccgggcaatagcaaggcggatcatccagctggcggagcatgcaggtgtaagcggtagtttagtgttggaggtaacggaggagacatcgcttgtgaatctgcccaatatcgcctccaatatcgagctgctgggcgctagcggcattcagctggcgatcgacgatttcagcatggggcagacgtcgctaagctatttgcgcagcaaccacttccattttgtgaagctggatggcggtctggtgcgccaggtggtggaaaatcagcgctcccgggagatcatcggttccatcgttaccttggggcacagcctggggtttcaggtcattgcagagtttgttgagaatgaagcgatcgaggatgagctgctgaagctggggattaccctttttcagggttatctgtatggaccggcggttccgcttgagaaattgctggcgcttgaaccaggacaaagaataatgagctgacgaggccatggatcccgtacgccataggcccgccccggtatctgctattggggcgggctttcgctttttatttgcccgatgttccatcactggaaaactggacggcaaatcgtctttgcgtatcccgcaccagcgcctgtgcctggctggcaacgcattcccgcacggtagcgggcaggccggggtcggaacacaaggcgatctgttcctccaaaacccgtaggcgggagcgcagcccgagtggcgaacgggaagcggtctgcatcagagagcccttccggaggcggtaaacatacaagctctcgtataaatggcgcgtacgccgggctttgagcagcgcgttgagggtaaagatctcgtcttcgttaatgatgccctcttcaaaatgcagcccggtttgcagcaaaaatttgcggctcaaacacaaggcccagaccatgcagcggtaatctcccacccggtacatatccacaaacatatctccgccgtccataagccctggatgttcgcgctgcctgcgccacgcctggggggagccatcacccatggtccagccatctttttcgggcagtatatcgaactcaaagcacagcagatccagcgttccggaggacatggctgcatacatgcgctgcagggcctgcggctttaaaacatcatcgctgtctaaaaaggcgatatagcgcccgcgggctgccgcgagtcctacgttgcgcgcgttggaaagcccgcgatccatttggtgaaaaacctgcatcctggtgtcttgatgggcgtatcgatccagcagctcccccgatccatcggtagagccattatcgatgcagatcagctcaaaatcatctaatgattgggtcagcgcgctgtttagacattcatccaggtaatcccgcgtatcgtgcacggggagaattacggaaaacaagggttcgttcatcttcatcgcaacctttttgctttagtgtatgtagaagggggcgggggcgtgaggcagttgcgcatgtgtatcaacggttgggggtgatgcagataaaaacacaaccgacaccgcataacgtgccggttgtgtaaaaatacgattaggatactgagagggatcaggatagatcaccatcgctggcagatgcaataccttcttccttatcgtcatcgtggcgcagctcgggttcctggatacggctgataacgacgatcgccgtaataaacagggcaaaagcaaaggcaaagggcaaacggcggtcaatacttgaaagccagcccgcgaaatagccgaagggagaagaaaaggcaatggtaaaggccatgatcagggcattgatccgggcccgttcttttggattgatattcagctgcagcaacgcgtcctttcgaggggttatcagggcacttgccaccgcgcccaccaggatataaatcatgacgaagaatacattttccgccggcgccaatatcagcaaaacggaagcgattgcgtgaagtaccagcccggcccatataggcgctttaaatttcatcgaatccatacggtgttgaatcccgattaaaaagatcaacatgaccgttgcgtttaaaatagggaacagcgccaggtaactatccggcagccccagtttttgcgttgcatatagactaaagaagtttacgctgaccatattggtgatatataggatgacaaagacggcgatcaccttcatgatctccctgtttttcagtacccggggcaccaagtgtttgtattcaaacaggatcttggcaaatgattggttctttgtttccgccatccgggcctgcccctgccgggtttctttacagtgcctgtaggtgatcaaaattttgatcatcatattgatcgaaaataccagatataagacccggacgacggggacgaccgaaaacgcattgataaacaagcccgagatcggtgcaaagaatacggcaatcaaaccgccgatattgcaccaggtatagatgccaacaaggtctttagcgtcggcgtcctcaatcagcagacaataccatgcggtttggttgatctgttcaaagctgttgaagagaactgcgattaaaaacatccaaaagttgttggaaacggcccagatcaaacaggccacaccccagccgaaaaagtcgcccatcatggtggtgaacttgcgccccagcttatcggtgaggataccaccgcaaaaggagaaaaacacctggacgaacatggcgatcgataagatcaaaccgatctgcacgtccgttacgcccagagtatacatgtatagcgtggagaagggggcgatcaggttataagggatcccccacagcggttcaattaagaccagtgtgcgtgggttacctttgtttcgcctgagcaattccaaaagcgggtgtttacccagtgcccttattttctgcatcatctcacgcggcgcctccccttcgactttaatttttctacgcggcccacttgttttttgcgccagcggcgcgtcgctttgctatgtatggcgtttcggatcgctaggtactattaaaaaataagcccataaacaccggtttcgctgtgtttatgggctgtctgccttggtgcggtcagtgggacttgaacccacacgtctctcgacacgcgcccctcaaacgcgcctgtctgcctgttccagcatgaccgcaagaccattcccgcctctatcctaccagtaggataaattcaggtaagaagcgcttataattataacaataaagcaagtgcctgtcaacactcaaaccatgtaaggcagggcgtgaaaatgaatatttacctagggtgcattgtaaagtggcggcggggatcttataatgataaaaaaggcggaaggcgggcgaaggcatttggataaaaggttagtggcgcccattgtcatcacggcatttttgatcgtttattttttgatcttcgcggggttgtgctttgtgctgccgatgccgctatggtcaaagtggaccggcctgatcgtaccgatggcgctcataggcgtttcactttttgtgcttgttgaacgaatcaaagaagtaaggagtggggaagaggatgatcttagtcaatactgattatatcaccggcaaagagctggagatgctgggcctggtgaagggctccaccattcaatccaaaaatatcggccgggatatcacccagggattcaaaaccttggtaggcggagagctgaaggcctataacgagatgatgaacgatgcgcgcgccctggcgaccaagcggatggtagaggaagccgaagaaatgggcgccgatgcggtggtcaacatccgatatgcctcctcggccatcatgcaaggcgcggccgaggttatcgcctacggtacggcggtaaaatttagataagaggacgcggtaaatagatatacagggcttacatgcgtgcaatgcgcttaaaacgaggataagcccggcctatacgcacgggcgctggattcgctgaaaaatgggagaggatacgggcgccgtgtcctctcccatctatttgtttctagctctgtttggggcatacatagcgcggcagcccctggctgtgcttgccatattcgatggcttctgcggggcagcggcagatgcacgccatgcagtgcgtacagtgcgtgccccagacgggtttgccctctgccgggcggacgttgccgagaggacagacgtgggtacatttgccgcaggatatacagcggtccgtaacataaaactttttggcatgcacgacaaaaggataaaacagatcatttacaataccactgtttagcctatcacttaaagaactgtgagagggcgcaaagcagtcgccgctttttattaaaagagacgcgcgatcgatcgcgctttcagcttgatcgatgatctggagggcctcgtccttggccggcgtcgtaaataatgcaatataattttcgggcatggtgatcccggcacagccgcaatagtgcatctcctttgcggcgcagagcttttttaggtatttttccgcattcccaatgctttcgccgcaggtcatgacaaaataaatgtttctattccccgtcaggctggtacgctccaaatagttctgtaaaatacgggggatccgccaggcgtaagtgggcacgacaaccacccacggacgtgatgagcgcatttgtgaaaaatcatgatgcttgatcttatcaaaaagatcaatgacttcatcgccgattgccttgccgattcgctttgcgacatatgcgctgttgcctgtcccggaaaaatataaaatcatggcgcttctcctttagcttatgcgcggcgcacagcgcccgggcacgatgttccatattgcttaccatttgcactagattacattctaaaacactattcatgcaacttttcatccattatacccagatgccggagcagacgcaacctcggctaaaggcaatgcgcagaaatgattatgcgctggcttattacgttgcctggcgattttgccgtaacttagggcttaaggtaatatgctttgataaacgcaacccggatggggcagagaggttgatcgaataaaaaaggcggcttaacccaggggctaagccgccgctatgcacaacttaaggtttattgaagctgagacagaaccatatccgcaaaaaagcggtgcatccgcagatcgtccgtcagctccgggtgaaaggaggtgaccagcagattatcctgccgcgcggcgacgatgtggcccttcacttcagcaagcggataagcccgaccccaggttttttcgatccagggggcccggataaagaccatgggcaatggcccgcccgagatgccggccaccggggcggcacagcggaaactatccagctgggtgccaaaggcgttgcggcggatagcgatatccatactaccaaggcgcgctgtttcgccgcacacctctttagccaacaaaatggcgccggcgcaggtgccccaaaccggcaagccagaggcaatgcgcgcctgaagcggggcctgcaggccaaagatgcgcagcagtttgccgatggtcgtgctctcgccgcccggcaggatcaacccgtggatatggtgcagatcctccggcgttttgacgggaagggcactgatttggggcagaacctccagcatggccagatgttcagccacagaaccctgtagcgccagaacgccgatcttctttaccggagccatggctaccaaccccgatcggccaggcgctcctcgggcgggatctcgcccaggtctttgcccttcatggcctcaccaatgccttcgcttacctgcgccagtactttgggatcgttataaaaagcggtggccttgacgatggcgcgggcccgcttttccggatcggcggatttaaagatgcccgagccaacaaacaccccctcgctgcccagctgcatcatcagcgccgcgtcggctggggtggcgataccgccggcagcaaagttgaccacggggagcttgccctcccgggcgacctggcagaccagctcgtaaggggcaccgtgctctttggcataggtcattagctcttcgcttggcatatgggtcagggcgcggatctcggccatcatcgtacgcatatggcgcacggcctcgaccacgttgccggttccggcctcgcctttggtgcggatcatgctggcgccctctccaatgcggcgcagcgcctcgccaaggttgcgggcgccgcagacaaaggggaccttaaaagcgcgcttatccaggtggtaggcatcgtccgcgggggtaagcacctcgctctcgtcgatgtagtctaccgcaagcgcctccaggatctgcgcctctacgatatggccgatgcgtactttagccattacgggaatggtcaccgcttcctggatctcgcggatcatcttcgggtcgctcatccgcgctacgccgccctgcttgcggatatccgcaggcacccgttccagcgccattacggccaccgcgcccgcctcctgggcgatcttagcttgcgctacattggtcacatccataatgacgccgcctttaagcatctgcgccaggtttttgttgagtgtcaaacgttcatccattcgtacggcctcctgattgtaaaagtttcttgcattatagctttaagactggccttaataaaatagtcagaaaaagtataattagtggggtcagttttggaggtggcaggccgggtgattcatgttataatatagccatcattattaaggggggaaaaggatatgcgctatcaaggcaagcgggtggccattattgtggatacgggtacgcacgaccacgagttttggttcccgtactatcgctttttagaggagggggcccaggtcgtcgtggcggggctggagcccggccaggtactaggggagggcgtaaacggaaaagacgggctgcccatcccggtagattgcaagatcgatgaactgcaggcagaggagatcgacctgctgtttttgcccggcgggatctacgggccgctgcggctgaggatgtgccagccgctgctcgagctggtgcgcgcctgccatgcgcggggaacgctgatctgttcgatctgccacgcgccctggattttgatctcggcggggctagtgcaggggcgcaccattgcctgcccgccggacatcgcggtggacattgaaaacgccggcggcgtacccacggaggagcccgcagtgctggacaagggagtcctaagcagcgtttattttggacggctgccggagatgtttgcactgttgaaccaaaactggcctgcataaagaggcgcttgcaggcgcatgagggaatcgattaaacaaaaagaggatggctttagccatcctcttttgttcgattcgtttttattaactagggtctacctgatcctcatcgtcaaaccggtcgccacactcggggcagaacttgggcggaagcgttttatcctccggctcccagccgcacttgtcgcagcggtagaccggtacgccggcgggtttctttttgccgcactccatgcagaacttgcccttgttgacggtgccgcaggtgcaagtccaaccatcctcatccggccgtttcgcgccgcattgcgcacagaatttaccggtattgccggtggagccacaggcgcaattccagccatccggtttgggctccggctttttcgcgccgcaggaagggcagaacttgccggcgttgccggtagcgccgcaactgcaatcccaccggctgccttcggcttcaggctgcccggaggcgggctgctcctgtcccatctggaaaaggtttgcagcgttcatcccgccggcattggcagccatattcatcccggcaaaggccatgacggggcccgcattggggttggccgcggcggcgcgcatggcgtctgcctgggcgcccaccatggtagctgccgccatggtggggttacgcataacggcggtgcgctggagctctttaatcatattctcgtcctcttccgaagcggaaacggaactgacgccaaaagatgcaacggcgataccgcgcagatcgcgccacttatccgatagctcttcgttaagggcctcggcgatctcggaggtatggccgggcagggcgctgtagcgcacgcccaaagcggatattttggcaaatgccggctgaagcgccgtcatcaactcggtctttaactggctatcgatctggccgcggttataggcgcgctccacattgccggaaacgttggcgtagaaaagcagcggatcgacgattttataggagtattccccatagcagcggatggcgatatcgatatccagcccgatgttctgatccaccacccggaagggcacaggcgaagccgtgccgtatttattgccgatgatctccttggtattgacatagtagacccgctgatctttgccggtatccacgccaaaggtaaagcgcttgcccaccagcttaaaagaatccatcagccccttgccaaagccgccgtacagcatgctgggctcggtactggcgtcgtacagaaactcgcccggctcggcgcagaactctaccaccttgccctggtcgacgatcatcataaactgcccttcgtttacggccaccaccgaaccgttggtaatgatattttcgctggcacgggtattggagctgcgggcgttggttcgtttgacgcccttggccaccaacacgtctgccggtaaggcttcacagtaaaaatactcccgccactggtcggccattacgccgccgatggcgccaccgatagctttaatcaagcccataatgcacgcgcctccccattaagcttgcgtattcgctcttttttaccattatagtgcattttatcccctttgaatatagatgtatgcaactaaaatttgccccgcagctctaccacccggcccagcacgcggatagggaggttggccacctcctcgctggaatagtgcatgggtgggaaattggggttaaaggagaccagacggatgccgtctttttcgcgcatcaggcgcttgcaggtcgcatcataaccattgaccaggacgatggcgatctgcccgttttccacctccggctgcttgcgcacgatcaccacgtccccgtccatgatgcggggctccatgctggtgccgtggatctgcaacgcgaaaaattcgcccgttgccgccagatcggtagaaatctcttcataatcgataatattttccaccacctcgatggggatgccggccgctacattgcccagcaccggtaccttgacgccccgcacttcctccgaaaagcccaaaagataatcgatggaaacatggaaataggctgccagccgctgcagtgcggcgttatccggctggctggcgccggactcccacatggatatggtagagcgggccacccccatatagctggccagcgcctgctgattgattttgtgggccttgcgcaattcttttaaatgctgcatctgttttaccgccctcatttgcttaagttacctctattataatgtcagatgtactgacatgcaagggggacaaagaaattaatgtcaatattattgacaaataatgggcaaggtgctatattgatgtcagagatactgacatataagcagaacctgcgagggaggaatgaacgatgctggagtttgcggagatgttgttggccaatgcgcagacgcagtacctggtggctgtgctggggctgtactttatgatgctggccgtggcgctggggttgtataagtgctttgtgcgcccgatggtcaaagatatcgcccgggtggtgcggggcgtacaacgggggacgatccggcgcaaggccgcggctaagtagacttttcgcgtaaataacatagacccttcttaaaattggatggcggacatggggcgttccctttggggagcgctccatgtccattttttgcgcgcctggggtagggagtatgttatactaaaaacgtgcaatattgatagcaaaggcggggattttttgtacaagaccattggcgccctggcgcatgtggatgcggggaagaccacattgtccgagcagatcctctaccacgccagggcgatacgcgcaccagggcgggtggaccaccaagatacattgctggattaccggcctaccgagcgccggcgcggcatcaccatatttggcgcgcaggcctcctttaccctgggggatacgcaatacgccctggtggataccccgggacacgtggactttgcagcggagatggagcgcgcgctctgcgttttagatgtggcggtggtcgtggtcagctgtgtagaaggggtacaggcccatacggagaccatttgccaaatgctgacggagcgcgggatccccactttcttttttctaaataaaatagaccgcgagggggcggatgccggacgcacgctgaaacagattcaagagcggtgcgcgcccggcgcgctggactttaccgacggctatacccagacgctgatcgaggagctggcgcagctggatgacgaactgctggagcgctatctggacagcggttttgacgaggcgctatggcaggcgcgcgcgggcgtgatgatcgccgcgggccgggtttgcccttgctacgtgggcagcgcactgggcggcagcggcgtctccgcatttttacagggattggagaagctgacttgtacctgttttgacgcaaatgggccgctgcaggcccgggcctatcagatccgccacgatgaaaagggaaaccggctggtatctttaaagattctgcgcggccggctgcatgttaaagatgcggtgggagaggagaagattgacgagctgtttttctgccagggcgaacgacgcatcccggcacgtgaggccgtggccgggcagctgtgcgccgtcaagggactgtcgcagatccggccgggagacgggatcggcctgcctgcgctggaagaaaggacgtttcgtccggcgctggcggccagggtgatctatgagcaccagcgtctccatgaggtgctgcgcgcgctcaagaccctggaagatgaggaacccctgctggcggtgacctggcaggaggcgctgcaggagatgcgggtgaatgtgatgggccccatccagctggaggtgttggccgaacagctgcaaagccgttttgggcttacggtaacctttggcccttgcgaggtattgtatcttgaaacggtgacggcccctgctgtgggctgcgggcattttgaacccctgcgccattatgcagaggtgcacttgcgcctggagccagggccgcggggaagcggcatcacctttaaaagcgcctgcccggtagaccagctggagcagaactggcagaacctgatccgcacacacgtgctggaaaagcagcacaaagggccgcttaccggcgcgggactgacggatacggttgttacgttgttggcgggccgggcacacgaaaagcataccgagggcggggacttccgcgaggctacctacagggctatccgacaggggctttttcatgcggaggtaacgcttttagagccggtgtatgcctttcgcattgcggtaccctcgcccctggccgggcgggtgatggcggacatcagccggatgcagggctgttttgacccgccgcaggacgacggagagagcgccctgatcgccggtgaggcgccggtggccaatatgatggactatgcggccgacctggcggcctttaccaaggggcgggggcggatcagccaaaagctggcgggctaccggccctgccacaatgccgatgaagtgatcgcccacagcggatatgagcgggacagggatgaggccaatacggctgattcggtcttttgctcacacggcgcgggctaccgggtgcgctgggatgaggcgccggcgcacatgcactgcaagctataataaaacgagtaacgggggagagaacaaaatgggaaaggtgaaacttggcgtatgccagtggtgcataccggcgcagggggtgcaggccatcgcattggccagcgaattgggctttgcgggcgttgagatggatatggggatcggcaagcccgggttggagctgcgggaagaagcggtgcttgacgcctttatcgccgcaaaggaaaaaacgggcttggcctacccggcgctggcgctaaacgggattgagatgaaccggccccaggtcgaggaggagacgcggacgctgatcctcagggcggcgcagatcgcccggcgattgggtgcggatatgctgcaaatgccctcgtttggcagcgcgcagatggaggacgaggccgattttgagcagactgtaaaggccctgcgctttgcctgcgaccaggcgccggatctacagatcggcagcgaaaacaccttgggcatccagggcaaccaacgtcttttggagcaggtgaaccgggataacttttttatctattacgatggcgcgaatatcgaaaacatccgcggagaggacggcctcgcgttttacacccagatggccggtgcgatacgtcaggcacatgccaaagatctgtatctggccaagccctggcaaaacgcgcagcccgcggtattgggcgagggggaatgccatgcgcgggaaatattggaaaccatgcgcgcttttaatttttcgggctggatatttgtagaaaacggacatgacagagaacggttgaaaagagatctggagatgttaaagcgctattttgattagaggtttcagcgcaaaagggctgggcagagggatgcccagccttttttgttggctggatgacaaaaatggacaaaatgtatgcctttcgcatagttgacaagaaatagcaatatgcctataattagataaactaactaattaatcggacgcgaaggagggatcaacatatgttggacgtttactcacaacagcttaacgatctgctggtagattcctatcgcgccctgcaaaaggtcgaggagaagatggtcaaggggacccagagtatcgacctttccatcagcgagatgcacatgctggagatcacgggcaaatacggcgaggaaggctgcaccatcagcgacctggcacaggagctgcagatcaccctgccatcggtgacggtggccatcaaaaagctggaacgcaaagggtatgtacaaaagatcaaaagtgagcaggatgcccggcgggtccatgtggtgcccacccgcgccggccgcaggatgaacgcggtgcaccgctacttccacgagcagatggtgcgcgcctttattcgcgagatcagcgaagaagagaagcctacgctacttaaagccatgcagaacctgaacgcctttttggaaaagaacatggataagatggatggcgccgcgaataagggccaaggcaattaaaggagatggagaagtgttaagaataaccggaaccggcagcgcactgcccgaaacgatcgtagacaacgaggcgttgaccgggtttttggataccagcgacgaatggatccgtacccgcaccggcattttacagcgccacgtaacgggggatgaaaccctggaggagctggccattgcctcggcgcgcagggcgattgacaacgcgggcctctcgcccgagcagatcgatatgatcctgtgctccagtgccctgcatacctatgtgacaccgggacttagctgcatcgtacagggagcggtaggtgcgccatcttgtccatgcatggatataaacgccgcgtgcgctggctttttatatgccctggacgtggcgcaggcatactttatggcgggcaaggcggaaaccatccttatcgtgtgtgcggaggagaccagttgcatggtggattggactgatcgggccacttgcgtgctgtttggcgatggggctggcagcgtgattgtccaaaagggtggacagatgggcccggtgaagatgagcacccgctgtgcaccggagtttttgcaggcgcgcctggcgccgggcaacagcccctataaaaagaataagctggaacccatgccgctgtatatgaacgggcaggaggtctataaatttgcggtctcctcctctacggcggatctgcgggatgtgatggccaaagcggagcttacggcggatgacgtgcgctactttttactgcaccaggccaatatgcggatattagaggcggtgcgcacgcggcttaagcagccgcccgagaagtttccgcactgcattgagcgctgcggcaacacctcttctgcaagcatcccgatcatcttagatgaactaaaccgggcgggaaaaattgacgacggcgattggctggccatgagcgcctttggcgcgggattgaccaatgcggcatgtatgctgcgctggggctaagccttcgtaaataaattaaaaaacatttggaggaaaagaaaatgacttttgaaaaagtagcacagattctggcggattacaagggtatcgacgttgcggatgtaaaacccgagagcacgtttaccgagctggggctggacagcctggatacggtggagttgatcatgtccattgaggatacctttggcgtatccatcgagatggatgagaacctcaagtgcgtcaacgatatcgtagcgctgatcgacgcggggaaataagcgatgattaagacgccgatttgcgaattgttcggcatcgaatatcctatctttcagggcggtatggcctgggtatcggatgcttcgctggcaagcgcagtatccgcaggcggaggtctggggatcatctcggccatgaatatgccgggcgaggcgctgcgcagcgagatacgcgcctgccgggagcgtacggataagccctttggcgtgaacatcatgctgatgagccctagcgccccggagcaggcccaggtggtactggaggaaaaggtgccggtcgttaccactggggcggggctgccctcaaagtttattaaaggatgggtggccgcaggcatcaaagtggtgccggtggtgccctccaccgcaatcgcgcggatggtggagcgcatgggggcctgcgctgtgatcgccgagggcggcgaatccggcgggcatgtgggcgatttgaccactatggcgctgctgccccaggtgtgcgatgcggtaaaggtacccgtattgggcgccggcggcattgccgatgggcgggggatcgctgcggcttttatgctgggcgcccagggcgtacagtgcggtacgcgctttctctcggcattcgagtgcacgatccatgagaattacaaaaagaaggtgctggaggcccgggatatcgataccattgccacgggcaagcggctggggcatccggtgcgctcgctcaaaaatccctttagccgcaagttttttgagatggagtacgatgccagcgtgacaaatgaagagctggagcagtacggtaccggcgcgttgcgcctggccgcccgggagggggacgaggagcacggatgctttatggccgggcagattgcggccatggtgaagaaagaacagcctgccgccgagatcattagcgaaatgttcggccaggcagagcagattttgttgggagcgacaaaatgggtaaaatagcctttgtgtttgccggccagggcgcgcagtatacgggaatgggtcaatccctctatgcgtgcagccctgcggctaaagaagtatttgaccgggcggaggcgatccgccccggcaccatccgccagtgctttgagggcgataaagagacgctggggcagaccatcaacacccagccttgtctgtttacggtggattacgcctgcgcagcagcggcaaaagaggccggcatctcaccgcagggggcggccggtttttcgctgggcgaggtggcggccgtggcgtattgcggcgtattggattttaaggccgcatttcgtctggtctgccgccgggcggagctgatggacgattgcgccaagcagaatcccggcgctatggcggcgatcctgcggctgaccccagaacaggtgaccgacgcctgtgaggggtttgacgcggttttccccgtcaactataacagcccccagcagaccgtggtttcgggcagcgcgcagcagctggaggcctatattgaaaaggtgaccgcgctgggcggcagggcgatgaagctgccggtcagcggcgggttccattcgccctttatggcacaggccgccaagggccttgccagctatatggccgagcttgaaatggccgagccggccctaccgctttacgccaattacgatgcggcgccctactgcgccgccagggcgaaggaactgctggccctgcaggtgcaaagcccggtgcgctggcaaaaaacagtagaaaatatggtggctgaggggtttgatacctttgtggaggtgggcgcgggcaaaacgctttgcggcctgatccgcaagatcgccccgcaggtacaggtctatcaggtggaaaacgagcagaccctgctggccgcagggcaggccctggcaggaggagagagatgttaaagggtaaagtagcgctggttaccggtgcctctcgcggaatcggccgcgccatcgcgctggagctggcgcgcagcggcgcggatatcgccgtgatctacgcgggcaatgcgcaggcagcggcagccacggtagcggatatcgccgctctgggcgtgcgggccaaagcctacgcctgtgacgtggcggactttgacgccgtggctgaaacggtgaaggcggtaacggcggatctggggccggtttacgtattggtgaacaatgcgggcatcacccgggataagttgacgctgcagatgaagcaggaggacttccagcaggtgatcgacgtcaacctcaagggcgccttcaactttatccgccacacgtactcgggctttgtgcgtagccgggccggacgcatcattaacatcacctcggtatcggggctgatgggcaatgcgggccaggccaattatgccgcggccaaggccggcctgatcgggctgaccaagagcgtagcgcgggagctggccgcccgcggggtgacctgtaacgcggtggcgccgggttttgtgcaaacggatatgaccgaccagatgcctgcggccgcccgggaagcgctgctgggcgctatccctatgaagcggggcggggttccggaggatatcgccagcgccgtggcctttttggcctcggacgcggcgggctacatcaccggcacggtgttgcaggtggatggcggcctgaacatgtaaggaggaacaagatgaaaagggtagcgattaccggccttggggtgatcaccccagtcggaaacgatgtaaatactttttgggaaaatctgaccgcgggtgtttgcggcatcgggcccatcaccaaatttccaacagacgatctgaaggtgaagatcgccgctgaggtcaaggattttgatcccgcggcctttggaatggatgtgcccacggccaggaaactggacctttatacccagtatgcgctggctgcggccaaacaagccgtagaggacagcgggatcgcggaatccggcttggcgccggagcgctttggcgtatatgtgggcagcggcatcggcgggatgaatacctttgtaaacgagacccagaagctgatgcaaaggggcccctcccgggtatcgccctttttcatccccatgatgatcggcaatatcgccgcgggaaatatcgctattcagtacggcgcgcagggcccctgcctgccggttgtcacggcctgcgctacctctacccacgcagtgggcgaggcctaccgggctattgcaggcggttatgcggatgcgatcatcgccggcggctcggaggccaccatcaatcccctggctgtggcgggctttaccaactgcatggccctggccgtggaggaagacccccacaaggccagcctgccctttgacaagcgccgtaagggctttgtgatgggggaaggcgctggcatcctgatcctggaggaaatggagcgcgcgcgcgcgcgcggcgcgaagatctatggcgagatatgcggatacgccaacacctgcgacgcttaccatgtgaccgcgccgcatcccgagggactgtgcgcttcccgcgccatcgctctggcggccagcgaagcgggtattcgggatgaggacacggtgtatatcaacgcccacggcaccggtacgcccatgaacgattcttccgagactctggccattaaaaaggcgttgggcgaggatatggcgcgccgggcgatgatcagctccaccaagtccatgacggggcatatgctgggcgcggccggcgcggtggaagccgcggcctctaccttggcgttacacaggggcgtaattccacctaccattaatcttgaagagccggatcccgcctgtgacctggactatgtgccgggcagcgcccgcaaggcgccggccacgttggccctatccgtctcgctgggctttggcgggcataacggctgtatcgcgatccggccggtagatgcagaggtgaaataatggatatcgcaaagatcaaggaattggcgcagctgctcaacgacgcgggcttaagcgctctggagcttaaagagggggatgctacgctgcggttggaatcggccaggtttacgccggcgccggccgcgccggcccctgtggtgcaggccgtgcccgctatggagccacaggcggtagtgactgcttcggcagcgtctgtaccggatggcggagtggattttaacgcgttaagcgagtttaaatcccccatggtgggcgtgttttacgccgcgcccggcccggatcaggccccgtttgtagaggtgggcaagcgcgtgaaaaagggcgatgtgctgtgcatcatcgaggcgatgaagttgatgaacgagatcaccgccgagcaggatggggagatcgtggatatctgcgtatccgatggcgacgtggtggagtacggccagacgctgtttaagattttttaaggaggcgcaagggcgatggacagagagcagatcaaggagattttgccgcaccgggagccaatgctgctcatcgaccgggcgtggctggatgaggacggcgtggcgcatgccctttatcacgtgcggggagatgagtttttcctccaggggcattttccaggcaacccggtggtgccgggcgtgatccagtgtgagatcatggcgcaggcctgcgcgattttgttgggcgagcagctaaagggcaaaacccctttttacaccggcatcgacaaggtgcgctttaaagcgcaggtgcgcccgggggacgatattgaggttacggccgaagttttgcgcgcaaaggggccgttttactttaccaaatgtacggccagcgtacgcggcgcgctatgcgcccagggggaactttcctttgcattggtagaagggagataaaggcgcccatgttttctaaaatcttgattgccaaccgcggcgagatcgcggtgcgcatcatccgcgcctgtaaggagatgggcatcaccaccgtggcggtgttttccgaggcagaccgggatgcgttgcacgtgagcctggctgatgagagctactgcatcggcccggcccaggtggggcaaagttacctaaatatggaggcgatcctttccgcagcggtggtttccggggcggaggcgatccatccgggttatgggctgcttagcgaaaacgcgcgctttgccacgctgtgccagcagtgcaatatcacttttatcggccccacgggcgaaatgatcgagaagatgggtgataaggacgaggcacgccgcaccatgaagcaggcaggtgtgccggtggtgccgggtagcgacattgtagaaacagtggacgaggccctgcgcttaggggcgcagatcggctatccgctgctggtcaaggcacgctcgggcggcggcggacggggcatccgccgggtagacagcgaggcggagacagagcgcgcctttttagcggccaccgccgaggcgcaaagcgcctttggggacggagccgtttatatggaaaagttccttttccccgtcaaacatatcgaggtgcagctgctttgcgatgcgcacgggcaggtggtctgcctgggcgagcgggagtgctctatgcagcgtaaaaaccagaaactgctggaggagagcccgtctgtggccgttagcccccaaatgcgggaggaaatgatggcggccagcgccaaggcggctaaggccatcggctaccaggggcttggcaccatcgaatttctgctttcgcaagacgggcacttttatttcatggagatgaatacccgcttacaggtggagcatccggtcaccgagatggtgacggggatcgacctggtcaagtggcagatccgcgtagcggccgggctggagctggattttacccagaaggatgtgaccttgaacggccacgccatcgagtgccgcatcaacgcggaggacccgtaccacgatttcaggcccagctgcgggcagatcactatgctgcacatcccgggcgggccctgggtgcgctttgatacggcgctgtatcaggggtacacaatcccgccgttttacgattccatggtgggtaaactcatcgtccacgcccccacgcgggaggaggccatccgcaaaatgcaggcggccctttgcgaagtggtggtggaagggatcgaaaacaaccgtgagttgcagctggacctgatctcggatgaaagatttggcgacggcagctataccacggattttcttgcggaaagggggtagcgccgttttagcctaaaatggtgcggagataatgctgaaaaagagcatgtttatcaaacccaagattcaattagagggtcagagcggcgatagcgtgcagactaaggataagcccacgttgccagaggaggtctgtacggcttgcccgagttgcaaggcgatgctctttatccacgatctggaggaggagatgggcgtttgccccaagtgcggctatcacttccgcctgggcgcgcgctcgcgcatcgctctgatcgcggatgagggcagcttttgcgagcacgatggggagatggccccggataatatcatcggctttgagcaatatgaaaaaaagctgcataaggcccagaagaccagcggagaaaaggacgcggcgctgacgggggtctgccgcatcgaaggtataccctgcgccatctttgcgatggacccgcagtttatgatgggcagcatgggcacggtggtgggcgaaaagatcacccgcctttttgagtttgccacccgggagcgcttgccggtggtgggctttaccgtatctggcggcgccagaatgcaggagggcattttctctcttatgcagatggcaaagactagcggcgcggtggagcgccacagcgcggcgggcaatttttacctgacggtgctgacggacccgaccaccggcggggtgaccgccagctttgccatggagggggatatcatcctctccgagcccaaggcgttgatcggctttgcagggccgcgcgtgatcgaacagaccatgcgccaaaagctgccagagggcttccagcgggcggagtttttgctggaaaagggatttgtggataagatcgtggaccggcgggaggagaaaaaactgatcgccgtcctgctgcggctccactgcaaggaggtgggcgcatgacggcgtatgaacggctttccgccgcgcgggccaaaggacggcccacggcccagcaatatattgcccacatttttaccgattttatcgagctgcatggggaccgggtttttgcggacgatgcggctgtgatcggcggcatcgcgtctctttgcggccggccggtgacggtgatcggcctggaaaaggggatcgataccaaggaaaaggtgcgccgcaactttggggcggcccagccggaaggatatagaaaggctctgcggctgatgaagcaggcggaaaaattcggccggccggtggtctgcctggtggacacggccggagcttattgcggcctgggtgcggaggagcgcggccaggggcgggctatcgcgctgaacctgatggagatgatggcgcttaaagtgccgatgatctcaattttgatcggcgagggcggcagcggcggcgcactggccctggccgtggcggatcaggtttggatgctggaaaacgcggtatattcagtgatctcgcccgagggtgcggccagcatcatctggaaggacgcctccaaggtggaacaagcctgtgagaacttgaagatcacggcggacgagctaaaagcctttggcgtggttgagcgggtgttccgggagccagaaggggatttcgccccgttgtatgaagaactgcgccaggcactggacgccagctttcaagaaactttggggtggccggtggaaaagctgctggatcaccggtatgaccggttccgtaaatttgggggtgtaagcgaatgatcgtaatcgtaaccgattccacggcgggcatgacgcatcaggaggccagggaactgggggccatggttgtgccgatgacctacaccgtggcgggcaacctccatacggaaacctatttaaacgcggatgtgagctatattgatgagattgccgccacgcaggacctgcgtacctcgcaggccgccattggcgagtacctagccacctttacccacctgcggcgcaagggatacgaggtgctatgcctggccatctcctctcggctgagcggtacgttcagcaatgcgacgttctgcgccaaagagctggggaaagagggcatacgagtggtggacacccgtactacggcgggagggttgctgctgatggtacgcgcagcgcggcggctgatcgacgcgggtttttctcttgaagaaacggcccgaaagatcgaagctatgcgggatgcggtcaatatccgcttttccgttgaggatatgacaccgctgcgccgtagcggacggttggggccggtgcgccaatcggtgggtacgatcctcaacatccgtcctatcctcacctgccgcaagggcagcgtagtagcctgtggcatggtccgcggccgcaacgagcagctgcgtaccttagtgaatgcggtccccaaggacgcccacgaggtattggtggaatatattaaggacaaagaaggcgcgcgaaacatggcccagcggctggaacagcgcttgaagcgcaccgttgaactgcgcagagtaggcccggtgctgggcatccacctggggctggatgcgatcggcgtgatctggcgcgaagatgaaaagcctacagtttaagctgataaaatgcaggcggcatgatcttggcaccgcggcatagtgaatagggggacgctttacatagcgtccccctattttttacataatctttagaagtttgccctgccggggtgtggtaagataagagcatgatctatacaaatatggcacaaggcgagtttattagccgccccaatcgctttatcgcccaagtagatttggcgggcgaacggatggatgtacacgtgaaaaataccggccggtgcgccgagctgcttacgcagggggcgcgggtttggctgcagcgcagcggcaaccccaagcgcaagacagggtatgacctgattgccgttgaaaaggacggacaggtggtcaatatcgacagcgccgcgcccaatgccgcgtttggagagtgggcagcggaaagtgggctatttggccgtaacccggccctttacccggagcgccgctttggcgcctcgcggtttgatttttatattgagcacgagggaaaaagcagttttgtagaggtaaagggagtcacgctgatgcgagagagcgtagctctttttccggatgcgcctaccgagcggggcgtgcggcatctccatgaattggtggccgcggcggcccaggggtatggcgcatatctgttttttatcatccagttaaggggcgcgcggtatttaagccccaactgggaaacgcacccggcctttggcgaggcgatgcgaaaggcgcgggaaggcggggtacacctgcaagcgagagaatgcatcgtcacgcctgagagcatggccatcgggcgcgaggtggagatacggctttaaaagtaaaacgttaggagcgggatatgttaaaggttgaaggggttactaagcggtacggcaaaacgctggcgaacggcgatatcagcttttcggtggaggatggacagatcgcagtgctgatggggcccaacggcgcggggaaatctaccatgatcaaatgtatcgtgggcttgctacgctttcagggcaagatcacgctgaacggttacgataataaatcggttgaagctaaggcgcagatcggctatatcccggagatgccggcggtgtacgatcttttaacggtgcaagagcacatgcagtttatcctgcgggcctaccgtaagttggaaaacctagactatgcgcaggcgctgcttgagcgcctggaactgtgggataaaaaagataagctgggcaagcagctttccaaggggatgcagcaaaagctctccatcgcctgcgcgttggtccacagcccgcgggtggtgatctttgacgagccgctggtggggctggaccctcacgccatcaaagagttaaaggcgatttttcaggagctgcggcaaggcggcgcatcggtgttgatcagcacgcatatgatcgacagcgtggaagatagctgggacgtggcgcatatcatggtgcagggacgctttgccgcaaccatggccaaccagccctccgaaatgaatgaaaagacgctggaacagctgttttttgagatcaccgaggggcgggaggaagggcgatgaaggcgcttttttacctgctgggcacgcggatcaaaaaccagttcaagcttttgctgcacagccccggccggttgatcggcgtggcggcgatgctggccctgctaatttttatgatgacgggggcggcaactggcgaggcggcggaagaataccgggatgtgggtgaggtatacgccatggctgcggcgctttacgccgtgatcttcgttatgaacgcgcgcaacggatttaataaaggagccagcctgttttccatggcggatgtgaacctggtctttgtgtcgcccatcaagcccaagcgggcgctgctttacgggctgatccaacagctgggcaccgcgctgctgctgggcttcttcctgctttttcaatacgggtggctgtataacatttatggtatcccggtgggcgcgctggtggtaattttgctggggtatgcatttacggtattttgcgcgcagctggtcagcatggcgctttacacccttacggccggcaaccccaggcgtaagcggcaggtcaaaactgtgttttacggcgtcataggggcttttgccctgtatctattcatcaggctgtatgccggcagggcagacctgcttggcgcgggcgtatcggcgctcaacgggccggcgctctccgcttttccggtggcgggctggctggccgctgccgtacggggcgcgctgacagggcagcttatgcctctgcttgtgggcgctggcgctacggtgctgctggtaggcggcattatcttatatatcgaaaaagcgcgcgcggatttctatgaggatgtgcttcaggccacagaagtcgccttcagcgccgcacaggccagcaaggaggggcgcatcggcgaagccgcgcccggcgcggtgcacgtgggcaaaagcggaatcagccgggggatgggggccagcgttttttacgaaaagcacaagatcgaaaaccgcagggccagaaaatttatagtggattccgcctcgatgacctttatactggtcacggtagccatggcggtatttatgcgggaggccggaatattagctgtattcgcctttgggacctatatgcagatgttctcggtctcgctggggcgctgggtcaaagagctgacgcgcccgtttatctacctggtacccgaaccgccctttaaaaagctgctttactgtatcaaggaaagcgtgccgcgcatggtagcagaagcggtggcgatctttatcccggtggggctgatcttggggacgggcccgatagaagttttgttttgtatcctggcgcggctgtcctttgggttgctgtttaccgcggggaatattctggtggagcgcagcttaagcgggctgaccctaaagccactgatcttgatggcctattttctatctttgcttgtgctgtccgctccggggattatcgccggcctgcttttgaatatggctgtagcgggggccctgggggacctgcccattttgctggggatggcggccgtcaacacactggtggggctgctggtcattttcctttgccgcaatatgctgacctatgcggagttgaacaaccgctagcccatgcccgcgtaagatttgacagcctggcgcgccatcgattatacttatatttcgatgtcgaataatgacgtacgcactagggcatatgggcggtgtgatgaaaggaatggtttttagctttgggtaaaattgcgttggtgaccgattcggcctgcgatgtttccccgcagttgcaagagcgttaccatttagatattatgagcttttcgatcacggtggatggaaaaagctacgttgaaagggaagattttacggcggatgaatattacgccatgctgcgcgaggcaaaggggctgccggccacggcacacattacccctttccgctttctggaaaaatttatggcgtatgacgaccaggggacagaggacctgatcctggtcaccatctgttctaaaggctccgccacgaacgatgcggcgcaggtggcgcgcacccaatttgccgaggaacggccccagagcaagatgcgcatccacattgtggatagctatacgtattcaatggcctatggcgaggtgctttgccaggcgggacagatggtgatggacggcgaagcggccgaaacgattctggaatttctagaggatgcttttgctagacgcgaggtcgtgctggcggcttattcgcttaaattcatcaaacagtccgggcgggtctcggcggcggcggccatcgcgggcgaggtactgggtgtgcggccgatcatcaccctgatcgatggggaaagcaaggtggtttccaaggtacggggcattggcaaggtgctgcccgccaccatggagatcgtcaaaaagcggatcgagccggacacaagttatatggtgggtattaccgatatgctggacgaacaggagacccgcgagatctgcaccaacgtgatgggctatccgcccaagggctttttcaaattgggtagtgccgtcagcaccaataccggcccggatgcggtgggcatcgtattttccggccagaagcgggcacgctgattttcgacaaaaatggatgataagccgcatgcgacctgtaagggttttgcgtgcggcttgtgttataataaggcaataggttgtaaaatacggactggccaaacggcgtttgaaaagggaagccagcggccaaagtggaatggaggccggcggcgttgcaggtgatactgagagattggatgttggaggatgcgccgcggctgatgcgcttggcggataaccccaaagtcgggcggtacctgcgggactttttcccctcgccctaccgcctggaggatgcgaaccactatatcgccctttgcctggcgcaccgggacgcggggcagctgaactacgccattgaggtagacgggcttttggccggcagcatctcggtactggggcagagcgatatccaccgcaaaagcgcggagatcggctattggctgggcgagccgttttggggccagggcgtgatgccccgggcggtggagcggatctgccaggaggcgtttgcgcgtttagacgtggtacgaatctatgccgaggtgttcgcccccaacaaggcatcggcccgggtgcttgaaaagagcgggttttatctggaggctgtgctgaaaaacagcctttgcaagggtgaaaggctgtatgacggcctgatttacgcgcgcatgcgggaaggagcaaagggatgaacgactatcggatcctggtggtggaggacgagctgaccatcgccgcgctgctttgcgagggcctctcaaaatggggatttgatgcgcagtacaccacggattttgagcacgtgctggctaccgtggcacgggaaaatccccatctggtgctgctagatatttctctgcccttttataacggctattactggtgtggggagatccgcaaggtctccaaggtgcccatcgtttttatctcctcgcgtacggaaaatatggatatcgtgctggccatgaatatgggcggggatgattttatcaccaaaccctttgaactggaaatcgtggtggccaaggtacaggccgttctgcgccgggcatacgattatcagcccgagagcgcgcatatcgccttttgcggcgcggtgctgaacctgggggaggcggcggtgtattatgggggcgaaaagatcgagctgacccgaaacgaatttaagatcctccaaacgctgctggagcataagggaggcgtggtcgcccgggaggagctgatgcaaaaactgtgggacagcgatagctttgtagatgacaacaccctaacggtgaacgtcaaccgcctgcgcaaaaagctggaggctgcgggcctggtcgactgcatcgaaaccaaaaagggattggggtaccggatcgatgattaagcaatacctaatctacaggcgggtgttgatcctgctctatctgacggtgatgattctcttcccgggggtgcaggcgatctgccgggtcacgctttccccggtgctgagcgtgatgcagatcatcacctttttcatggtcattttttggataggagattttttgcgctttcgcgggcgtcaccggcaactcgagcagatcgcgcgccagctttccgtacagccgcacgagtttcccacgccccgcaacctttgcgaggcggacgatttcatggtaatccagggattgtacgataaactgcgggacagcctccaagccgtggatgaacaccatgccgagcaggaggaggtctacaccctttgggtgcaccagatcaaaacgcccatcgcggcgctgcaactgctggagcaaagcgacctgccctttgacgataaggcgcgggcgttactgcgccaagagctttttaaaatcgagcaatacgtggagatggcgctacaatacataaaaatggaggacctctccaccgatcttgtggtgcgggagtatccgttgcaagagatcgtgcgcgccagcgtgaaaaagtatgcgccgctgtttatctataaaaaacttaccatcgaaatcgaggacttcgatacggtggtgttgaccgatagcaaatggctctcctttatcatcgagcagctgctctctaacgctatcaagtacacctatgccgggggcgtatcgatcagctgcaaaaaaaagatgaacggccgcccggccgagctgcacatccgggataccggcatcggcatcaagcgcgaggacctgcagcgcgtatttgaaaagggctatacaggatacaacgggcgggtggataaaaaggccagtggcatcgggctgtatctggcgcgcaaggtggcccgggagatggcccacgaggtctatctggattcgaccgttagcgaagggacgctggcggtggtgcgctttcccctgcacgataaggctgattatgagtaaacatctgacatggatataaggaaaaacttggacgcgggagcaaaaatgatcgtaaccttctaaagatgaatgaagcggcctggggcaaagtgacaggattgtaaggttaacaggcggaaatgtaagctagagaaatggcagcgcatttccgccgctttgtataatgggtgtaccaaggagagaaaagaggaacatacatggagcttttagaagtcaaaaaccttaaaaaagtatataatacgcgctttggcgcccagcagtacacggcgctttcttccgtcagctttgccattgagcggggcgaatacgtggccatcatgggcgcatccggctcgggcaagaccacgctgctcaacatcatagcctcgctggataagcccaccagcggagacgtgctgctggagggaaagaacctgcgccagatcaaggaccgggagctttccgccttccgccgcaagaatttgggctttgtctttcaggattttaacctgctggataccttttccatcaaggataatatccttttgccgctggtgctgagcaatgtgccctataaagagatggaaaagcggcttgagcccattgccaagagcctgggcttaagccagctgctgcccaagtacccctatgaggtatcgggcggcgaaaagcagcgcgccgccgtagcccgcgcggtgatcacccagcccaaactggtgttagcggacgaacccaccggcgcgctggactccaaatcctcccagcggctgctggacatttttgagcagctgcacgatggggggcagacgatcctgatggtcacccactcctccatggcggccagccacgcttcacgggtgctgtttattaaggatggcgaggtgttcagccagctgtaccgcggggaggagagcaaccgggagttttttgacaagatcgtagccaacctgtcggtactctcggatgggggtgtggacattggctaaaggctttttcgcgaagatggcctggagcaacttaaagcgcaaccgctcgtcctatatgccgtatttgatcgccacggtgatcacggtggccatctactttatcatcgtcaccatgatggatacgccagggctgcgcaacgtgcccggcgggcctaccttgcagaccatgtttatgatcggggagactgtgctggtcgtcttttgcgtgatctttatggtctacctgaacagctttttgatcaagcggcgcaaaaaagaattcgggctttacgccatcctgggcctggaaaagcgccatgtgggcaggatgatgctctgggagagcctgatgctcaatggcggggcgatcgtcatcggcacggtggcggggctgatcttcggcaagctgatctttatgatgctgatggggctgctgaacgtctcgccggacagcgaattcatcgttccggcggaggcctttatcaagaccggggcgctgtttttggtcatctttatctttacatcgctatataatctgttcaaggtgcgcttggccaacccaatcgaccttttgaccggtgaacagcagggagaaaagcgcttccgcacggcgatccccttagcggtcatcggggcgacgctgctgggttgggcgtactacacggccctttcggtgcgcaacgcctcggatgcgtttatcggctttatgttcgcagtaatcgctgtgatcctggccacttacatgctctttaccgcgggcagctacctgctgctgcgcatcctgcggcgcaataaacggctttactataaacccaacaattttgtggctatctccggaatgatgcaccgcatgcggcaaaatgccgccgggctggcctctatctgcatcctttcgaccatggtgctggtcaccatcaccaccagcgtatccctttacgccgggcaggagcagatgctaaaggtactctatccaaatgatctgacgatctccatgaatgaggaggtctatacccagcgcattgatacgctcaaagagcagattcgggaaacggccgcgcaaaacggcgtgaccatcgagagcatgtatgccacgcataccctaaatatgacgcgccggctggaaggggatcaactgacccagccgggaaccattgattataccgaccccagccggatggatgtggcctttctcaccgccgggcagtataacgagctgacgggcgaccagctggagcttgaggcgcaggaaacggtcgtgatcaccaatgcaccgctgggcggcatgcagagcctgacgattaacggccatacgctgcagatcgcccaggcggtatgcgattcgcctttggtggacggtaaaaacagcgaggagaaaaacgacctctttctagtggtgcgcgattgggaaacggcccgggaggtcagcgggtataaagaggataacgaagattcgccctcctgggaaaattgtactttggtcgtcaattacacgggtgagcaggacaagatgaacggctttgccgcagctgtgaacgatctgcgcaaactggatggcgatgtgatctaccacgtaaacgacatcaacaccaaccgtttggacatctacggcgtatccggcgggctgctgtttatcggcgcattttttacaatcctgttcctgatggccacggtgctgatcatctacttcaagcagatatccgagggctttgaggataaggcgcgctttgagattctccaaaaggtcggcatggatgacagggcggtaaagcggtcgatcaacaagcagattctactggtattcttcctgccgttggtgggtgcgctgctgcacaccggcatggcggcgaatatgatcatcaagatgctggaaatgttctcgctctacgatgtaggcctaacgctgggctgtatgggcatcgcctgcgtggcgttctcgctggtctacgtgctggtctatcagcttacggcaaaggtctattaccgcacggtcaaatggtaaacgtgacttaagtcctctctcaagaggcccttccgcggcaaaaaggcacggcatacgccgccctttaagcgatggaagggcctctttttatggtatactaagcctatcagatgaaaatggaggggatagcagatggcgcatttacaggggcagctggtatgcgatatggtagcctacgaaggggcggatcacggcagggtcaatcactttttaaaggtgtacgcctatgcgcgcaccatcgccctgcaggagggcctggattgccagcagcaggagatactggagcttgcggcgatcctgcacgatgtgggtattaaggtcagcgaggaaaagtacggcagcggcgcgggaaaataccaagagatcgaagggccgcccatcgcgcgtgaaatgctgaataagcgcggcgcgcccctggattggatcgagcgggtaagctatctggtggggcatcaccatacctatcatgatgtgcaggggatggattaccagattttgctggaggctgactttctggtcaatatcgaggagggcggcatgccgttaaacgataagatgcgcagcctttttaaaacgcaggcgggtaaagcgctgctgtgcgacctgtttggcggatgatggggagcaaattgatggacggcgtatatgcggtggcgctgccccaggcggccgcgcagctgatcggcgtgttgaacgcggcgggccatgcggcctacgcggtgggaggctgtgtgcgcgatagcttgctcgggcgcacgcctaaggactgggatatctgtaccgacgcgctgcccgaacaggtgatggcggcgttccaatcgtttcgtgttctgcctaccggtttgaagcatggcacggtaacggtgctcgtagacggtgaaggatatgagatcaccaccttccgcaaagaggtgggctatagcgaccatcgccatccggatgcggtagcgtttgtatccgccctgcgggaggatttggcgcggcgagattttaccatgaacgccatggcgtaccacccgcaagagggcttaaaggattatttcggcggggtagcggatctccggcgcggaacgatccgctgcgtgggtcagccgaaaagtcgctttgaagaggacgccctgcgtatgatgcgggcgctgcgctttgccgcggtctacgggtttgccatcgaggcggagaccacccgggcgatacacgcctgccgccgcctgctcttgtgcgttgcgccggagcggctgcgtgcggagctggacgccctactgtgcggtgcggccgtagaaaaagtgctgctagcctttccggatgtgatctttacgttgatccctgaattggcgatggcgcaaggctttaaccagcacaaccgttaccatgcttatgatgtttggacgcatactgtcaaaagcgtagcggccgcgccgcaggatataaccttacggctaacgatgctgctgcacgatgtgggcaagccgctgtgctttacacgggatgcatccggcgtggggcatttttacgggcaccctgccgcgggggcgcgcctggcgcgggggatattatcgcgccttcgctatgatagggctacggccgtgcaggtagagcgcttggttgaacagcattgccgcgagcttccgccgcgggataaacccatgcgccgggcgctgaatcggctaggcgaggcgggcgtgcgccagctgctggccgtaaaacgggcggatattaaggcacaggccccagacgttatagaagaaaggttattgactctttgccaggtggagcgctgtctggatgaggtgctggcgcagggggcctgctttaccctaaaggatctggcggtgagcgggaaagacctgttggagctgggcatgcgacctggccccgacgtgggcaaaacccttaaggcgctgctggaggatgtgctggacggcaggctggaaaatgaaagagcgcctttgctggagcgggcaaaaacactgcaacaaaaggcgcatcgcttgtagcgtaggttgagccataaggcaaaagcagccgaatatttcggctgcttttgccttatttatgtatgaggatatttgggaatgggccgagcactaaacgtcaatataatcggctgaggcataccctacccggccgttatagtgcaccacgtaccaaccctgccactcgcctacaacggtgatcacatcgccgttttgcgcctgggtgattacgttcccctccaaagagggataatcccgaatatttagcggactgccctgggtgaccacccggccgtttaaccaaggctggggctgtacaaaggggatgccgaagtactccgtcagggagagtacgacattttgcgcgataacctcgatgttgttcttgatccagttggcatcctcgacattgtcgtgataggcaaattcgatcagcacggctggcgcgcgggtgcgagcaacctcgccgatggttgtggtaggcagtgtgcgcaccagactggggataggataaatatcacgcaaattagcggcgatgatatcggccgcccgccggcttcgcgcactggtgggataataatatacgtcactaccgcgtacctgccctgccatggcggccggtgcggcattggagtgcagcgccaggtgcaggtcgtaattgccggcgttagactgtacgatggaggacgcggccgtcatttgcggcgtattgcgggtgaactggatgccgctggcaatgagataaggctccatcgcgtcggcgatcaggttcatgtattgctcctcattgccgccggtgacgtactggttaaattcctgggtggacgggctcaagtagataaagggcataggcactcctccttacaggttgttcaaatgaaaaagcggtttgataccagtgtatgccagatggtataaaaaggtgaaatcatatgcgatcaagtcgcttgtgacaaacaatgcgcaaaagcacatgcaaatggacaaaaattattcgggttaaatcattgcggcgggcggtaaagttagtttataatttaaatgtagccatatagtaggatgaggacgtttaaaggaaggtgatgttcaatcgcagcgggaattttaattggcgcagttattctgttcatctgtgtaggttccagtaagatactttatcgctttggcgtgccgacgcttctcatgttcattctgttgggcatggttttcggctctgacggcctggtcggcattccttttgacaactttgaggtagccaaacaggtctcttctgtagctctggtctttatcatgttttacggcgggtttgggaccaactggaagatggcgcggcccgttgcgctgccttctattttgatgtcgaccctgggcaccgtggtcacggcgctactgacgggcgtattttgccacttcgtgctgcgcatggaatggctggaggggctcttggtgggctcggttatcggttctacggacgcagcttcggttttctcgattttgaggagtaaaaaactgaatttaaagggcggcctggcctcgcttttagagatcgaaagcggctcgaacgaccctatttcctatatgatgacggtgatcgtactggccctgatgtccacgggtgcggacatctccgtgctggggcagctgtttgcccagatcgcctttggccttggcggcggatttttgctggcctatctggcggtccggctgctgcggcatgccagctttgagatcagcggcctgcatacgattttggtggtggctgtggcgctggcggcctacgctctgccggagctgatcggcggcaacggatacttaagcgtttacatcgtgggtatcgtgctgggcaacagcaagatcttgcataagcgcacactggtcaacttttttgacggcatcacatggctgatgcagatcgtgctgttctttatgctggggctgctgtccttcccctcgcagatgccggccatcattttaccggctctcgccatcgccctgtttatgacgtttgtcgcccggccggtggccacctttgggatactcagctggtttaaaatgagctttaagcaaaagatcctggtctcctgggcagggctgcgaggcgcggcttccatcgtatttgcgatctttgccatgactagcggcgtttatccgcacaacgacgttttccatatcgttttctttgtggcgctgctctcggtcacggtgcaggggactttgttgccgccgctggctaaaaagctggacctcgtggaggcgacgggagattcggtactgcgtaccttcaacgattatcaagatgaaagcggcaccaagctggtggagtttaccgtgcgcgccagcgacagctgcgtcaataagagcattatggatgcagacctgcccgaagaggtgctggtggtcatgatcaagcgcggcaaggaattcatcgtccccaagggcgctacggtgatacgagaaggggatatattggtgctgaacggaatggacaccagcaaatttttagcttagaaggggcagcgatatgaaaaacggtacattgcgcgcggacattcagatcggggcgctggtggacatcgtactaaagaaggatcagcccaccggcaaactgacgcgcggccacgtaaagcggatcttgacaaaatcgcccaaccacccccatggcatcaaagtaatgctggaagagcaggaacaggtggggcgggtaaaaaacatcttgaaggagtgaagaccatggcattgtttatcgcctatccgccatgttccacctgccaaaaggcacgtaagtggttacaggatgccggcattgcttttgaggagcgaaacatcaaaacgcagccgcccacggccggggagttggcgcagtggcaaaagatcagcgggctggcgctgaagaaatttttcaacaccagcggcatgttgtaccgctcgctggggctgaaggataagctgccggatatgggagagcaggagcaggtggagctgctggcctcagacggcatgctggtcaaaaggccgatcgtgatacagggggataccgtgctggtgggttttaagccgcagcaatgggaagcgcttaaaaagtagcgcgataaaaagttagaaaaaatatggaataattccaaaaacaaagcaggaattatcctagataagtcgaatgtttataaagtatgttcataaatatgtgaacgggaagaggattaaaccttataccagaaaggggactaaacaatggcgaaagcagaaatttccctgcaaccgtatagcatccgtgagtacctgaaaacgccggagcagtggaaggattccatgcgcaaagtgcgggagatcggttaccggtcggttcagatcgggcgcgttgccggcctgacgcctcaggagaccaaggatcatttggatagcctggggatggagttgagcacctattgcggcgatttgttctctatccgtgatgatatcgacggttttatcaaagagtgtaagctttttgacgtggacgagatcatgatcggtaccatgccggcagagttccgcgtggaccgcgagggatatgaaaaagccatcgacctgatgaacgaggtgggcaagcagctctcccaggcgggtatctacctggcctatcacaaccatgcccaggagttccgccgctggggcctgaacggcgtgcgcgggatcgacctgctctttgataagctcaatccggattatgtccacttcatgctggatacccactgggtgcagtccggcggcggcgacgtgatcgagtacatcaaaaaatgcaagggccgcatgcagtacatccacgtaaaagattaccgcattgcccccatcaactaccatacctggtttggcgctacccccaaggagtttgccgagatcggcgagggcaacctgccttggcccgagattatcgagacctgcaaggaccagggcatcaacatcttcatcgtcgagcaggataacacctacctgcgcaatgcctttgacgcggtggagatcagcttcaacaacctggtgaaatacggcctgaaagcgtaattgggcgctttgatccgattcgatgacgattaccgttaaggaggttacttgaatatgaagatttccctttgccctatggcgatcggtccctatctgcgcccgttgcaaggcgaagtgatggattccagcatgccggaagctgctttagatacggtaaaatccgcactgaccaaggtctctaacatgggttatgacggcattgagaccgctacgcccagcgtcttttcctgcccgcaggagttccgcgattttatggattccatcaatctcgaggtgctgacctgcggcggattgacttatgacgagctcaagtttggtgacctgaaggataagattgccgagtgcaagaccctgggcgccaaaaacgtgatgatcggccagatgccgcacgagtgcgcgggcaattatgacgagttgctggccttctgccgtgcattgaatcgcgccggcaagattctggcggatgaggggatcgctctttcctaccacaaccatgcttgcgattttgctaaggtcaacggccagagccatctgcagatcatcctggataacacctgcgataagagcgttttctttgagttggatacccactggctgcagtccggtggcgcgcatgttatcagctggattaaaaagacggctggccgcgtgcgtttcatccactttaaagattacggcatcgacgagtactccgataccaactggctggagtgcacccacaaactgtggatggagatcggccagggtaacctgaactggccgggcatcatcgaggcctgcaaggaagccaagatcgagtggtgctctgtggagcaggatgtggttcgccgtcctggctttgaggccagcaagatcagcgtggactacctccacagcctgggcatcggcgccaaacgctaaatataagacgcgtacgaataccccgcgggcttttgcctgcggggtattttttgtttttgccggcgctggacgcaaaactcgctatttttttcttgcgatgggcggcgaacatgttattatagtaaaagacgggttttgcccgtaagttatcaatctatttagtttatgcatagaagggatgaaggccaatggagaattattatcagccggagatcgagtgcgcgtcccgcgagcagatccgcgcctggcaggatgagcgtctggtgaaaacggtgcatcatgtttataaaaatgtgccctattaccggaatctgatggatcaaaagggcgtgacgccggaggacatcaagtctgtagacgatctgcacaaattgccctttttgaccaaggacgatctgcgggaggcctatccgtacggcctggtggctatgccgctgagcgattgcgtacgcatccaatccaccagcggcacgacggggcgccgggtggtcgcgttttatacccagcacgatatcgacctgtgggatgagtgctgcgcacgcgccatcatggcggccggcggcacgaaggacgatgtggtgcatgtcagctatggttacgggctgttcaccggcggcccggggctcaacggcggttcgcataaggttggctcgctgacgttgcccatgagctcgggcaataccgaccgccagatccagtttatgacggatctggggtctaccatcctttgctgcacgccctcttacgcagcttacctggccgaaaccatctgcgagcgcggcctgcaggatcagattaagctcaaggccggtatcttcggcgcggaagcctggagtgaggagatgcgccaggatattcagaataaactgggcattaaggcgtatgatatctatggattaactgagatctccggtccgggcgtatcctttgagtgcagtgagcagaccggcatgcacatcaatgaggatcattttatcgccgagatcatcgaccccaacaccggcgaagtgctgcccgatggggaaaagggtgagctggtgttcaccagcatcaccaaagaggccttcccgctgctgcgctaccgcacgcgggatatctgcgtactcacccgcgagaagtgctcctgcggccgcacgcatgtgaagatgtccaagcccatgggccgcagcgacgatatgctgatcgtaaaaggcgtaaacgtgttcccctcccagatcgaaacggtgctgttgggcaagggttacccggccaattatcagatcaccgtcagccgcgaaaacaacagcgataagctggatgtggaagtggagatgaccccggagatgttctccgactcggtgggcgatattgagacccgcgaggccgaactggtggcggctctcaaagccatgctgggcatctacgcgaaagtacatttggtggcgcctaaaaccattgcccgcagcgagggcaaggcggtacgtatcattgataaccgcaaattatattaaaagggggcataaagcatgacggcaaaacagatttcggtctttttgcagaaccagccgggtaagctggctgatttttgcgagatcctctccaaacaccatattgacatgcgggccatgtccatggcggaaagccgggactttggcatcctgcgcctgatcgtggacgacagccagaagacggcggatgtattgaaagaagaaggatacgtctatgcggtgaccccggtactggctgtggaagttcccgatgagccgggcggcttgatgaaaatcctcaacatcctgaaggagaaccagattaacctggaatactcctatgcatttatcgcccgcaagacggattgcgcgtatatgatcttccgcgtgcagcagaccgagcaggccgcggaggcgcttgccaagggcggcgtcaagctgatctgccagcatgaattaagtgagctttaatataaactcggtgctttaaggggtggccgcagctattgctgcggccatttttgtagttttgcttgacaaaaataactgaaataattataattgcagtataaactgaaacctttaaaataacagattggggcggatcataatgaaaaagagctgggtaaaaagcgtgctactggccggtgtgatgacgactgcggcggcctgcgcgccggtgggcggcacggcttaccataaaatcgacgcggaggcggcaaagaccatgctggatcaggaaacgggcatagtacttgtggatgtacgtaggcctgatgaatacgcgcagggccatattcctggggcgatcaatatcccaaacgagaccataggtacagctgcgcaggatgccctaccaaataaggaaacgacgcttgtggtctattgccgctctggcgtgcgcagccaccaggcttccggtaagctggtcgatttgggctatcgcgcggtatatgatatgggcgggatcatccactggccttacgatacggtaaagggggatggagcgaaatgaagcgcaaaaagggcgttttcgcggtactgacggcattaacgctgggggcggtttggctgctctcggcctgcagcccggctgcggcgccggcgccctctaaggccgccgggcgggatgacaatgcctttggaacctttgaaacatacgatttgcagggggaggcggtatcgcaggagctattttccggttcccggctgaccatggtcaacgtctgggcaacctactgcggcccctgcctgcgcgagatgccggatctgggcgaattggcaggcagctatcaggcggcggattttcaggtggtgggcgtggtgagcgatactgtaaaggcggacggaacgtatgatgacgctcaggtagctgtggccgaacagatcatccaaaggacgggggcggattaccgtcacatcctcccctcgcaaagcctgctgagccggttaggccagatatcagccgtgcccacgacgctgttcgtcgatgcgcagggccgccaggtgggacaggcgtatcttggggcgcgcacaaaggcgcaatggcaaagtatcgtagaaggtctgctggcccagctgcccggccaggatgcgcaaagcagcgccgggacggaaatggggtccgacgcgcctgtgacccagggtacggaaaacgtgggctttacgcggtttgaaacgactgatctattgggcaggccggtggaccaaagcgtgatgacggaaagcgcgcaagaattgatcctagccctggtatggaacccggaatggactggcagtaccgaggcgctcgggcagttggcacagctagcggcgcaggacagccgtattcagccgctggggctggtcgtaggcgatcccgcccaggcgcaggcattggcccaaaaggcgggagtggattttaccaacattattctgacgccggaattggaaacgcttttagaggcaaaggcgccgcaggtgctggccttttcgccctggggtacggtagcctcccaagggctggacgctgacgccgtgccggaaaaatggacgcagttgatcgatgaagccgtgtataacctctatgaaacctgttgcagctaaaaagaggtgcagatgatttaaaagataggcgtacattggcgttagacgcctgcgctgccagcgagaagagcgtcattgtcaggtttgccagatgtatacttgcatccggcatctgttttcgctataataacagttaaagagctgaaagcttatcttgaatttggagggactccttatgacgggggaatttgccatcgcagtgcatgcgctggtctttttaaatcgccggggggagacggtcaacagcgaaacgctggctgataatgtctgcacccaccctgcaaggctgcggggcgtgatggcaaagcttaaaaaagcgggcctggtggataccaaagaggggatggagggcggctatgccttccgcaaggacccggcacaggtgaccctgcgacagatctgcgatgcgctgaatgtaaaactggtttcggcttcctggcgctcgggcagcgtggataagccctgcatgatctcctcgggtatggcggacgtgatggatgatctctatagccagatggacgcgctggggcgtgagtacctttcccatatcaccatcgcagatattgacaggcagattttcagcggcaaagaaaatggtgaatccgcttaagcgaagatgagaaaaagacgcacggttttaccgtgcgtctttattttatacctcactgcgggccatttagcagcagcgcaaagatggcggcttcatcttggtagcggtcataatcgcctgcgagcgtgccgggatcgtgatagaccacgcccagcgcctcgttgcgcgccagacaatccatcaacttttctaccccgtactggcgcacaaatgcggcaaaggcgcggggtttgagcttggcgagtatgggattatcctcacaaggaaaattttcgcacgcccagcagccttcgtagcccttttcgcgggagcatttaagagatttgcaccacgcggcgtcagggcagccatcctttttgcaaccagcacagccctccttggcacaaaggcagcaggccaacccacagcaaccgattcccagttcccttttcatttgaattccccctcttttgtttttccattaagcgccctcggacaggcgcatgaatacccgttcgataaatagagatgccgcgcccaaagcggctgcgtcgctacctacctgggcgatgcgcagcggaagcgccccaccgaaagcacgccgggccaggctgtgctgcagcggttctacgtatagatcgccgtattcggccagctctccgcccagcaccaccgcgccggggtcgatcaggttggcggcgttggcgatggccagtcccgcatagtccgcagcgcgggaaaagatgcgcttgacgtcacggtccccggcacgggcggcgctggccgcctcttccaaagtcagggcttcgtaatggttgtgcagtctgtcggccagcccctttgcccggccctgccgcaaggcgaggcggcattgctccaaaatcgcccgggtagaggagatagtttccaggcacccccggttgccgcacaggcattttttgccctgtggcaccagggtcatgtggcccaactccccggtcaccccgcgctggccgcggtagatcgacccgccttccatcattcccatactgatgcccaaagagagtcgcacgaagataaagttatcaatatcctgcgccgcgcccagcagatgctcggaataggccatgcaatccggatcgtgctctaaaatcacctccaacccaaatgcatcctgtagatactggcggatgttgacggaggaaaaggtgccgaactgatgcgtccagatcgagataccccgatctgcatccacctggccggggaaggccacggcaatacccttcaccgagccagagggtaccttttgcaggagatgtgaaaccagcgctttcatctgcgccaacacttcgccggagtggcgggactcgatagcctggcgcgtgcgggtgattacgcggctgcgcaggtcgatcaccaccccggtcatgccgatgaggttgacgtcgatgccgatgatcaggttatcctcaacattgatatcaaaaccgctgggggttcgccccggcccggcactttgcgccttttgctgggtgatcacaccacgctcaagcaaaatgccgcacagattgctgacgctgccccagcttaaaagggtacgatcctgaatctggcgcttggtcaccggcccgttcgcgcggatacaattaaaaatgctgcgcatgttggcggcgcgcatggcatcgtggttgacggtctccaaaggtaagctgcccccttcttttaactaaatacagtataacataaaataggggattgacaatatatcacatcgtgataaaattaagctaacaaagcaagttaggggtggtgtccatggaaaacatcaatcagttggcggcgggtttgctgcgggactatgcggccgacgtagccgcgcgggtggtacgcaccgattttgaaacgctggggcagatcgcggcggatctgatcgccgccaaggagcggggtgccacggtttttacggctgggaacggcggcagcggcgctacggcctcgcacatgtgtaacgatctggtcaagggctgtagggtccatggtcgcgaggggttcagggctcagtgcctggtggattcctcacccatcatgacctgtctggccaacgatttttcgtatgacgacgtatttgccatccagctgcgaacctttgcacggcggggggatatctttatcggctttagcggcagtggcaattccgaaaacgtgctgcgcgcggcaaaggcagccaaagagctggggatgcttgtgatcggcttctccggccgggacggaggcaagttggccccgctttgcgaccgggtggtgatcgcccccaccgattccatggagcagttggaggatatgcacatgctctacgagcacgcgttggtctgcatcatgcacggcattttgcaggaccgctggggcgtagaatacatcaactatccggacccggagcggcactttaccgctgcgctgttcgacttcgacgggacggtcagcctgatccgcgagggatggcgggagatcatgatcccctactttaccgaggtgctctccgcgctgaacaccggggagagtccggaggcgctgcgcgcgctggtggcggattttgtggataagctcaccggcaagcagaccatcttccagtgcatgcgtctagatgaagaagtacaaaaacggggcggggcagcctgtgacccgctggtttataagcaggaatacctgcgccggttggggatccatattgccgaccgggtcaagggattggaagacgggagcatcgcgcccgaggcgttgctggtacccggggccaaggacttcctcaaggccctgcgggcggcgggcatccgctgctacctggccagcggtaccgacgaggtggatgtgctgcgcgaggcgcgcctgctgggggtggatcagtacttcgacggcggcgtgcacggcgcgcgggacgagatactggaatgctccaaggagctggtgatccgcgacctgctggaaaatggggacattaaaccgcatcagctgctcagcttcggggacggctatgtggagatcgagctggtgaaaaacgtgggcggttactccttcggcgtggccagcgatgaggcacgcaaaaagggaattaatgagtggaaacgccagcggctgactgccgctggggcagacgccatcattccggattttacgggctatgcccgcatcatacacgacgtgaaggaggggatctaaatgccttttgctcagtttgaccgatccaaactcaatatcctgccgctggagcagcgcatccatgatatcgatatcagcgtcatcaaaacgctggacgatccgattccggattatgaccacccggccctggaccccattgcccgcgacgtggtagccgcccgcaggcagcatgacgctacggtgcttatgatgtacggggcgcacgtgatccgcaccggcaacggcctgcatatgatcgagctgatgaaaaagggcttggtcacccactttgccaccaacggcgcgggctccattcacgactttgagttttccctcatcggcgccacctgcgagagcgtggccaaatacatcagcgagggacaattcggcctgtggacggaatccggccggatcaacgacattatccgcgagggcgtgcaagatggccttggctggggcgaggcgctgggccgctatatctgggagcagaaactgcccaaccgggaaaagagcgtgctgggcatgggttaccacctgggcgtgccctgcacggtgcatatcggcgtgggcaacgatatcatccatgagcatcccaactgcgacggggcggccatggggcaggcctcgtataccgactttttgatctacacccaaagcataaccggtcttgaaaacggcgtattcctcaactttggttccgccgtagcgggcccagaggtgtacttaaaggcgctggctatggcgcgcaacgtggcccatcaggagggcaagaaaattgctcattttaccacagcggtatttgacctgctggccatcgagcaggatgcagacttctccgctgccccgcccaagaccgatccgcgctattatttccgcccgtggaagactattttggctcgcaccgtggcggacggcggcaagagctattacatccagggcgagcaccagaagaccgtgccgcacctggcacgcaagatcctggcgctggataagtaaagggggcatttcatggatacggaccggatcatcgctgcccttgggcgcacgcaggacgcccgcatcatcgtctttggggattattgcctggataaatatttgtatatcgaccccaagcgggacgagccctctgtagaaaccggccttacggcctatcaggtgcaccgcaaacaaatgtacgcgggtgttggcggcaccatcactaacaacttgcgcgcgctgggcgcccaggtgcgctgcatcggcgccatcggctgcgatggcgaagggttcgagctgaaacaggcgcttaccaaggtgggcgcggatatccgctacatggtagagatgcccgaccggtgcaccaacacctataccaagcccatgcgcaagcagcccgacggcagctatcaggagatggagcggctggattttcgggatttttcgcccatgccgcaaaagtataaaaaggcgttggtgcaggcgctgcgcgaggccatcgattgggcggatggcgtgatcatcaccgatcagttcgtgcaggaggatagcggcgtgctcaccccctttgtgcgcgaggcggtctgtgccttggccaaggagcggccgcagcagtttttctatgccgattcccgcgcgtttatcgatgcgtaccgcaacgttatggtcaaatgcaacaaccacgagctgctcaaagccatgcgcccggggcaggcactagaacccacacaggcggttctggaggcctgcgggcgggagctttgcgcgcgcaatggtaaaacagcctttgtcactctgggtgaaaaggggtccatgatctttgatggggagcaggtgaccgccgtaccggccttccgcgtttccggggagatcgatatcgtcggcgcgggggatgctaccaacgcagggatcatgttggggctgtgcttgggcctgaaggtagaggaggcggccctgttgggcaactgcgtttcctccatcaccatccagcagattggtaccaccggcacggccagcccgcagcaggtggcggggcggctaaagggaaacctgtaaaacagggcttaaagcgagcagcagggggcgcggaatttccgcgcccttatttgtttgtggtataatggcagcagatgaggcaaaataaatcgccgggcgccggggcatcccggcgatgagcgcgacggaaagggcggtagacaaaccggatgcaacagacaaaggtcaattaccaaagggaaatggagaagatcatatccgcgatcccgcagggcgcgcggccgcggttgctgctgcacagttgctgcggcccctgttccagcgcggttttagaggctctgatcccgcattttgatgtcgcagttttttatgataaccccaatatcgccccagaggcggaattccaaaagcggctggaagaacagcgccgcctgctagagcagatgccccttgcccaagaggtgcatctgctctgtggcgtttacgctccgcagcgcttttatgcggccgccaaagggctagagggcgagccggagggcggcgcgcgctgcacggcctgtttccgcctgcggctggaggccacggcgaaagccgccgcccagggcggatttgactattttaccaccaccctatcggtcagcccgcataaggatgcgcagcgcatcaaccgcctgggcggggagatcgcacaggaatatggggtagcctatctctatgcggattttaaaaagaaagagggctataagcgctccatcgccctttcaagggaatacgacctttaccggcaggattattgcggctgcgtctattctttagcagcggcaaaaagcggcgcgcaaggcagggcttaaatctttacggagtgctaaagcctttcttaagatttgatgaaagccgcgccaaagcgttgacagggctttccagtggcgtgtatagtatttttgtcccatttggacaaaattcgcgcattcgggcgcagaggatagaggcagtaatggataaaccacaacaggaagagtttcggcaggacgcgccggaggctgtggatgcagcctatatcaaaaaaagaaagatcgtttctatcgtatcgctggctatttttattgcgctgtttgcctggctgacctttgccgtaggcgggccgctggtacagctggcgcaggagcccgagaagttccgcgcctggatcgatgaaaagggcatgctggggcagctgctgtttatcggcatgcaggtgctgcaggtggtaatcgccatgatacccggcgaggtgctggaggtgggcgcgggctatgcctttggcgcatgggagggcacgctgctttgtatggtaggggtagccatcgggtcaacgctgatctttttgcttaccaagcgctttgggcttaaactggtggaggcctttgtgccgcgcgaaaagttgcgggagctgaaattctttaaaaaggaaaagcggctggagctgctgatctttctggtattctttatccccggtacgcccaaggatctgctgacctacttcgcagggctaaccccaatcaagctctcccgatttttgatcctgacttccatcgcgcgcatcccctcgctcgtatcctccacctttggcgggcacgcgctgggggagcaaaactatacctttgccattatcgtttttgccgttacaggattggtcagcctcttggggctgggggcttatgggcttttgatgaagcacaaaaacaaacaggcgcagatcgaggaagcgcataacgcacaagaaaatgaagagcgataaaaaagtggccgtcagtggccgcttttttttcgcgcttatcgtcctaaattagtttgcacacagggggataaacgccctttacggtctgtaaaattctgctataatggaagcataacatcaatcggcaatgcaaccacatcttaagccgagaaacgcgaaaggaaaagggaatatgaaaaaggtattggtcttaggcgattatgaaaaggcgatctatcatcccctgcgcggcgttgacgagcaattaaaaagcatcttgagcgattgtgaagtgaccgcgtgcgtcgcgtacacggaacttaaactggcggacctgaaccgctacgatatggtcatcaactatatcgatgcctggaaggagaccgggtgcccggcgctttcggccctgctattgggctttgttgcggcggggggcaagcttatgaccatccacaacggcatcattacccaccaaagtcccgatatcgaacagatgcagggcggggcctttttgcgccatcctgagcggtgcgacctgacctatagcccggtaggcgagcatcccatcgtaaaggactttcagccctttaccgtcaacgaggagccctaccagttcgtgatagacgagggcgccaaggcggagctgatcttaaactatgcctatcagggcggcgtttaccctgcagcctgggtgcgtccctttggtctggggcaggtggtctacctctctccagggcatgaggccgcctcgtttatgtgcgagggatttagagagctgatccgccgcagcgcagcctggctgatgcaataaggcggtgaggatgatgaaaaccgctgtcatttccggggccgaccggggactggggctgtccatggccaccgctctgctggcgcagggctggcgggtatttgccggccgctttttagaggaatatgcgctgctggatgaattgcaggcgcagtaccccgaactgtaccctgtgcagatggacgtatcctcgcgcgaatccatcttggaagcgtatgctgaagtttgccggcatacggatcatgtcgatatggtcatcagcaacgctgcatacatgggcgggcccaattccagcacttttaaaggcgaactgcccatcgattttgcgcttttggagtattccttcagagtcaatgctttgggcgcgctgcaactggtggagatctttttaccgctgttggaaaagggggatatgaagcggatctgttttatatcctcagaggtttccagcgtgaccatgatgcaccgggatgcggggttccgctataccatgaccaagacggcggtaaacgtggcttgccgcatcttatataacgacctgtttccccgggggtataccttccgcttgtttcagccgggatggatgcgccgcgtcctgcccgacggcagccgggccgccaccggcacggtggatagcgacgaatctgccgcggttgccgtggcgcagtttgtggccgaccgggaggatgaacaacgcctggtgctgaccgattacctgggcaacgagtgggcgtattaagggggcgggagagatgaaaatattgttgaccggcatacgccgggattttgaccgggaactggcatgctttttcgtagagaaggggcatacggtttttgcgctgggcggaatggatggcacattgccggcggtgaccttcctgccgtaccagcctttacaggaggacagcgcccggcagctggcgcagatattggatgaaaaagcaggctggatcgatgtgtttatcgataccagcgcggcgcattttgaagcggaggagaataccatccgccaggggatcgatcccgaagccgtgatgcgcagctttcgctttaatacgttagcgccgctggaggcttttgaggcggtgctgccgctgatggacaggggcgaatgcaaacgagcctgctttatcagcgaccatcgggccagcgtaaactggaacgatcagaaggcgggctttggtccggccatgagcaaggcagccttgcacaatattttgcagattgccaaaaaccggctctcacccatgggttacaccttccgggtgtacgaccctctgacgcgggagacaaacatctcgccacgccaggccgcggccggcgcctactcgtatatttgccgccgacgggccatcgacccggataccccagggcgggatgacgaacgccgtctggtccttcgtgacgcactgggacgggagtgggcctggtaaagctatctatatggaaaagcactacaaaagcggatgatgttttcatccgcttttgtgatacatacgattttgttgaaagtatttctgtaagagtagagagcgagttcatctgttccacgtaatgcggtaatgtatggcgctgccggtgaactattatgggattttcgagacacaaagcagctactgttttagtacaaatcccgcccatatctgttttgcaaagacgaacggtgcatgttctttacgaacggaggctttggggttatactaaatatagcggtataaccgaaaacccaagagtatagaagggcggaaaaacgattatggcggaggtaatcctctttggcgaaccattgaccctgttcgcctcggaacatgtgagcgacctgcagcatgcggatctgttccgcaagtttttggccggagccgaggtgaatgtttccattggccttacgcgtttagggcatccggtatcctacgtgacaaagctggggaatgatccctttgggcattttatagcggataagttggccaaagaggggatcgggacccaaaacgccacctttgacgatgcgcatttgaccggcttccaaatcaaaagccgggtagaaaacggtgacccggacatcttttatttccgcaaaaacagcgctgcatctaccctgtcaccagaggatatcgaccaggtagactttgccggcgtgcggcatgtacatttaacaggcatcgccccggcgctttcggatagttgccgtgcagcggcgcagcggctgattgcccgcgcgcgggaaaacggcgctaccgtatcctttgatccgaatcttcgcccttcgctgtggaaggatgaggcgaccatggtgcgcaccctcaatgcctttgccgcccagagcgatatcgtgctgcccggcatcggcgagggaaagatcttgaccgggtttgaggacccggcgcaaatcgcggcgttttaccggtccgccggcgccaagtgcgtcatcatcaaaatgggcgggcaaggtgcatacgtgtccgagggtacgcgcgcgtttaccgtgccgggctttaaggtggaaaagatcgtcgataccgtgggcgcgggcgacggtttttctgtcggggtgatcagcgcccggctggaaggcaaaagctttgaggaggctgtgcggcgaggcaatgccattggcgctatgcagatcgccgtgcagggggacaacgagggcttgccgaccccggcgcagctggaggcgttttacgcggcccaccagggccaataggttatcgacaaaaggagtggatcacaatggacgattgtatcttttgcaaaatcgcctcgcacgaggtgcccagcaatatcgtgtatgaggacgagtacgccgtagcttttaacgatttgaacccccaaaccccggtgcatgtgctggtggtgcctaaaaagcatatcgcctctattgccgctgcacaaacggaggacgaacagcttttagggcatttgctgcttacggtacagcgggtggcaaaggcgcttggggtggaggaaagtggctatcgtgtgatctcgaactgcggtaaagatgcctgccaaagcgtgcagcatttgcatctgcatatcctgggcggcaagcccatgcaagagcggatgggttaaattgcgacaaatttgctcaaggttttctcgccgtgtgcattgacatgggaaaaatcaatagagtataatattcgtatgccgtttcccatagcggcgaccgatgcagggtcggctagcatacgcagtgtgtgtgcgaagggagggttaagagattatgtctgaaattcgagtaggcgaaaacgaatcgctggaaagtgcattgaagcgcttcaaacggaaatgccagcgcgctggaatcatgagtgaaattcgcaaacgcgagcattatgagaaacccagcgtgaaacgtaaaaagaaggcagaagcagcgcgtaagcgcaagtattaatcggttttccctgcactttttaggcggggaacgcatgatggggtaatcaatttacccgtttaaatgcaaaagagcaacaagcccgggcgatgatttccgggcgaggtgaatcggcaggctcatggccggctggaaacatccgtttccagccggcttttgctttgcccgtgtggatgtctattcggacggggatgcgcataaggttagtctagggaagtttatgtaaaggaggcctttgcgcccatgaaggataaacacttgagacgggtcaaggcggagctgagcgaatggtttgaactgcctgaagagatcatgctggacctgccccatatcgagattttgggcaacgaccgcatccatatcgaaaaccatcgggggatcatcgagtacacgcagacctgtgtgcgggtcaataccaacgccggggtgatccgcatcacgggcggcgcactcaacgtgcgcaacattggcagcgaggagatcatcgtgctaggcagtatcgaggcgatcgagtatcaaaagtaatgttgcttttgcgcgctggaataaactgatggataaggagcggcccgcatgctgagcgcgagaatttggtattttttgacggggtatgtctatattcgggtagagggcctatccctggaaaaactgcttaacctgtgcgcccgccagggggtgcgcttttggggcgtagagcggcccacctatacgctgatgtatgcccgagtggggatgcgcggctacctgaagatgcgcaaactgctagagcaggtgcgctgtacggtcagcgtggtgcgcaagtgcggcctgcccgcgcagcttttaaggctcaaagggcgggtcggctttgcgctgggcacgctttgctgcctggcggcgctgttttttttaacatcctttgtctggagtatcgatattaccggccttgaaaagatacctgtagagcaggtcacacagctgctggacgagtatggcgtcaaggtcggcgtcccctccagcagtatcgacctgcacgcctgccaggcgcggctgcagctggattgtccgggcatctcctttgtttcgatgcggctaaaaggggtgcggctgcatatcgaggtggtggaggcggtggacccgcccggcatgctggccaaagaccagccctgcgacctggtagccgataaggcgggggtagtggcggagatcacgccgctggatggggtggccaaagtgcaggtaggccagcgggtaaatgcgggagatgtgctgatctcgggctggatcccccatgatgaagcgctgggcaccgggcgtagcgtgcatgccaacggcagcgttaaggcctatatctggtatgataagaccgtgatgatggaccgagaggcggcgtccatcaagcctacgggtcagatgcatgagcggcgctttttgcgcctaggcaactggcagattcagctatccgggggcgaggtgccctatacgctggtggatacccgctggcggcgcctgccgctgctgggtgcggggcggcttttcccggctgaggtgctggtggctgcggattatgagctggccgcccaaagcggtgcggcagacgaggaggcgcttaaagctgcggcggaggcgctggcctggcagcagttggagggggaaattccgttggacgcggaggtgctggaccgtaccgtggagctgagagataggggcgatggcacagttgaggtgcgcttgcaagtcaaaaccatcgaggagatttcccagatcgccccgaccgtttgatggaaagggagacaaaaaagttcaccaaaagggtattgacaaaacggaagggatttgctatatttttctcaatcaaacgcgatgatagggcaaaaagatcatcggttcgttcaagagagctgttggctggtgcgaaacagtgcggatggtggttcacactccccctggagcggctgcactgaaagggattcaattaggtgcggacggggttgcgcccgttaaccatgcagggcattgatcgtgatgccgcaaagagggtatagcatgctatgccaataagagtggtaccgcggaagtttacgctttcgtctcttgcctggagcaggaggcgaaagcgttttttgttttacctcctgccctaaaaagtaaggaggaagaaaatatgaaactggcattttcgacgttaggctgtccggattttgattggtcggacatctactccatggcaaaggactttggctttgcgggcattgagctgcgcggcctgggggatgatatcttctccgtgcacgcacgccctttccgggaaaaacacctgccccatacgattgagcggcttaaaaagatgcgcctggagatcccttgtctgtcttccgcctgctgtatgaaccaaagtggggaagacgcgtgtgaaacccaaaaagaactgaaagagtatatcgacctggcggccaagctgggttccaaatacatccgtatcctgtgcgaggagcatgtgcagcctactgaagaggtggacgatctggtcgtggtgcagaacctgcgcgccgtgctgccctatgccgagcaaaacgatgtggtgctgctgttggaaaccaatggcgcatatgtagacaccgcaaggctgcgggaggtgctgcaggccgctgccagcgattatgtggcggcactttgggatgtgcaccacccctatcgctttgcgggcgaaacgccggagcagacggtgcaaaacctgggcgcctatattaagtacgtgcacgtaaaggattctgtggtagaggatggcaaggtggtctataaaatgatgggggatggcgatctgcccatcgactccatcatgcgtgcgctgcgctctatcaactacgagggctttatctctttggaatgggtgaaggcctatgcaccggacttgagcgatccgggcgtggtattcccgcactacgccaactttatgagccgttatatggatacgcccgcggaatcgcgcaggctttatgataatcatgcgggtacgggcaagtatatctggcccaaggagcatttgatcgatttgaccttcccgcaggttttggaccgggtagtggaggaatttccggatcagtacgctttccgttacaccacactggattacacccggacctattccgagttccgggacgacgtggacgcctttgcccgctcgctgatcgccatgggcgtgcgcgcaggagatcacgtggccatctgggccaccaacgtgccggcttggtacatcaccttctgggccaccactaagatcggcgcggtactggtcacagtgaatacggcctacaagatccacgaggccgaatacctgctgcgccagagcgatacccacaccctggtgatggtggatggctataaggacagcgactatgtgggcatcatcaaagagctctgccccgagttggccacttcgcctaaaggtaagccgttgcacattaaacgtctgcctttcctgcgcaatatcgtcacggtagattcccagcaggagggctgttatacctgggacgaggccatggccctgggcgagcgggtgccggtagaggaagtctaccgccgcgccgccgctatcaataagcacgatgtttgcaatatgcagtacacctccggtaccacgggcttccccaagggcgtcatgctgacccattacaacgtggtgaataacggtaaagccatcggcgactgtatggatctttccacggcggatcgcatgatgatccaggtgccgatgttccactgctttggcatggtgctggcgatgacggcgtccatgacccacggcaccaccatgagcccgatcccggccttctcgcccaaaaagggtctggcttgcatcaaccaggaaaagatcacggccttccacggcgtgcccaccatgtttatcgccatgctggggcatgaggactttgacaagaccgactttagccacatgcgcaccggcatcatggccggcagcccctgcccgatcaaggtcatgcaggaggtcattgaaaagatgcatatgcccgagatctgcatcacctatgggcagaccgaggcctccccaggctgcacgatgagcaagaccaccgattccatcgatgtgcgcgtcaacaccgttggcggcgccatgtacggggtggagtgcaagatcgtggacccggagaccggggaggacctgcccgataatgtggacggcgagttcgtcgcccgcggctataacattatgaagggctactacaagatgcctgaagccaccgccgcagccattgatgaagaaggttggctgcactcgggtgacctggcccgccgggacgagaatggcaactacaagatcaccggccgtatcaaggatatgatcatccgcggcggcgagaacatctatccaaaggagatcgaagactttatctatacccatcccaaggtatcggatgtgcaggtgatcggcgtgcccgataaacagtacggcgaggagatcatggcctgcgtgatcttaaagccgggcgagacctccagcgaggcagagatcaaagaatttgtttcctcccacatggccaagcacaaaacgccgcgctatgtgacctttgtagacgccttccccatgaatgcggcgggtaagattttgaagtacaaaatgcgggaggacgcggtgaagctgttgcagctgcaggcggataacgccattgagaccgcatagcgtttaaccgtattcctaagtgaaataaaaaagccggggcttttgccccggcttttttctacccataaatatagaggcatgtcaatctcggtagatcacatctgcaagaaataatcccttagccggggccagcggcccggcctgcgcgcgctgtttggcctccagggcagagcatacctgttcgggcgaaaagcgcccgtaccccgcctccaccagcgtgccggtcaggatgcgagccatatgccataaaaatccatcgccggtaaaagagagtgtgatcaacccatcgcgctggacgatctctaccgcatttaaagtgcgcacagtagattttttgccgggctttgcgcgggtaaaactttgaaagtcgtgccgccctaaaagcggctgcgcgcttagacgcatactttccacatccagaggatccggcaggtgccagctatagcgccgggcaaacacatcgtgacggggccgattgtcgatgcggtacagataggttttggcgcggacgtgaaagcgggcatggaagtcctgggggacctcctcgactgcctgtaccacgatatcctcggggagataatggtagcagtaattaagcatatccgttacaggcaagccgctatgggtattaaagttggccacatagcgcagcgcatgcacgcccgcatccgtgcgcccgcagccggttagggcgatcttctcgcccgtcatgcggccaagcaccgcctccagccggccctggatggtattggcgtcatcccccaggcgctgccagccccggtaacggctcccgtcaaaggccagtgtcagtttaatattgcgcattacgccacctcgttttgatctatttccaaatcatagcacattttttctgttggggaaagggcgcctagcaccctgctgagggcgaacagaaaacctgccggcggcataaattgggaatatcaatatggttattgggagcgatagatgtgcgtgattcaaatatattattagatcagtttaaaaggacgccgcggttttatgaataccattatgaccggacctgccccagcctttctgcgcggccggacagctggcaggtgcgcgccgtacacgccaacaaccgcattgccgaccagccccagatcgacgtgctgcgctacaagcgcctgcgccagatctggacgttcacctgctgcggcggagtcggggtcaagcccatcgtcaatggcgagcgggtatactttttgtcgggcggcggatatgcctattgcgtcaataaacgcagcggccggctgttgtggaagcggatgatcgcccttggcagggaggctgagctgaaggactttgccggcccgggcatcaccctgggggattgctggtatgtagcccggcgcggcttaggcggcggggggctgctggcctgcctgaacctgcatacgggctgcctgcactggcagatcaccctgcccgaaggtgtggatccagtgggtgtgcaggcggatggcgaaaacgtatacctgttagccaatggcctggatagcgcccagcagaccggcatttacgcctatacccaggcacaggggcaggccctgtggtccctggcagtggcgggcagcggcaacctgcacgaggctacgctgggcgatacggccgcattgcttctgaaggaccgtagactttacgtatccgtacacaagcgccggggctggcggcgcagtgaggaagtggtcgcaacggacctgagcagcggcagcctgttatggaaatatggcactcgcgtatgcgaaagcgaaccggtgctgacaggaggtgtgccggcactgtttaagatcagcggcaaggtcatggtgggcgcgccattgcaggatgggttttattattgctttgaggcggataccggcaagatccgctggcacacgcggctggaactgggcccctttccggcggggaacggctggcaggccgatgcggccagcattggcggaggtaagatcattgtaacggcccgccagctcagtggccgggaggtgctccagcagaaaatgctggcgctggaaatccgcagcggccgccagctgtggcgcacgcgctcgccctttgcgggctactccagcggtgtactgtgtaacgaccttttcgtctgggcggatcaaaaaggcatgctgcgcggctgcgacagtcaaaatggcggagcgctcaagcgcagctttgtaaacggcggcgaggtagcggcggatatcaccgctcagggggactgtttgtacgtaggcgcgttggaccccgcagcctcgggaacgccggggctgacggcctggcaggtggaatagaaaggcggatgaatcgctatgggagaaagacacatggttggcggtatacgccttttggcattgacggccgccgtttgggtggtgctggccgcaaccgcggggtatatggcgggaagtctggggctggtagggatggctcttgtgggcgttgagggcgtgctcgcgccgcttgcatgcgtctattggcaggcaagagcggagaaagaggcccgcaggcgtacggaatatggcgcgctgggggccctggttatcggtgcgctaggggtgctgttttgtacgctgctcatgatcgcggcgatccggcgtctgggcgcggcgcacacgccagtccctttggcgtccagcgtcccgctggctttgctgatgctggcggggatagaatgcggataccgctgcctgcgctgcgcggcaaggcgaaaacaaagcgcggtgctgcggggcgaggcgctggatagaagggcccgtctgccgctggcggtatttgcgttggcgggggtgatgggcgggcagtatggcttggcatgggcagatttgattgcaggtctggctttaagcctttacgccgccgggcggctgctgctggcgatgcgggcgatcctgaaacgggagagtaccggatggataaaagagagcgttcagctggcgcgcgcttgcgatatatcccagcccccgcgcaggatatgcatccgctgggatgggcaatatgccgatatagatctttcaagcccgacaggcccatccggttcacacatggtaaaagcaaattttatgggaagatgcgcgctcttttcgctccgaaagtgagattaaaagaaatatataagggaattaaagcggtgcgcttaaatgcgcgccgcttttgatatctatcgtgtataataaagaaaaaagaacgggggaaaacaggatgcaagcagcccttgaacggtttttaaagtacgtaacctatgatacggcctctgcctatgaagagcaggattaccccagcacccaaaaccagaaggtcttcgcccagatgctggcgcaggagtgccggcagctgggactgggggatgtaatggtggatgactacggatatctaaccgctacgctgcccgcaacgccggggtacgagggagcgcctgtcatcggttttctggcgcatatggataccagccccgatctttccggggccaatgtgcggcctcgggtggtggaaaattacgatggcggggatatcccgcttgacctggagcaggggatcgtgctctcgccggggcgctacccctcgcttacggcatatgtagggcaaaccttggtggtaaccgatggcaaaaccctgctgggcgcggatgataaagcgggtatcgcagccattatggaggcgatggcgcatctgctggcccatccggagatcgcgcacggcaagatccgtatcggctttacgccggatgaggaagtgggcaacggcgtaaagtattttgacgcccagggctttggcgtggattttgggtacacgttagatggcggcgcgctgggcgagtttgagtacgagaattttaacgcggcgcaggcgaaggtttcggtcaaaggggtgagcagccacccgggttccgccaaggatgtgatgataaatgcggccctgatcgcggcggaatatgccatggccctgccgcagggggagacgcccgccaatacccaagggtatgaggggttttatcacctccgggagcaaagcggcacggtggagcgggcgcagctgacctatattctgcgcgattttgaagaggacggcctgcagcggcgcaaggcgatgatgctggaggtggccaagcggcttaacgcgcgctatggcgaaggtaccgtagcggtagaattgcaggaccaatatgccaacatggcccagcgcctggaagagcatccgcaggtcaaacatctggcgttggaggccatggcgcaactgggcgttacgccggtggtcatgcccatacgcggcggcacggatggcgccatgctttccacccggccggatggcttcccctgccccaacctctttaccggcggtcacaatgcccatggacggtatgaatacctggtggcagagtccctggagatggccgccaaagtcatttgccgcatcgttcatttggcggcgcaggcggattgaatgtttaaaagcatgcgggtacgggcggacgtatttttgcgtccgcccgttttctttacccgccgcgcaggcataccgtcataggcttttacgtagagtagataagagcttgtatgatgggagaaaaagtagaatgtggtggatcatcttactctttgcggtggggctgtttttaatcattaaaggtggggacctgttcgtggatgcggcggtatggatcgcagaggtcacgggcatccccaaattcataattggggcgaccatcgtaagcctggccaccacgctgccggagctttgcgtatcgctcatctcggtggcctcgggctcggtagggatggggatcggcaatgcggtagggtcggtgatctgcaatatcgggctgatcatggccctgtcgctgctgtttatgccgggggcgatcagtcgccgggaactgctggaaaaggggtttatgatgatcagctccggcgcggtactgctttttaccgccgccaatgggctgctcaccaatccggaggccatcatcctgctggcgctggtcgtgctttatatcattttaaacgtcaactctgttgcgcgcaataaccgcgctgcccacatcccgcggcgcaggttcgtagcccgggaggcgggcggcaatgccgttaagttcgccctggggctaggagggatcctgtggggcgcgcagcttttggtggataacggcgcgcttttggcgcgcatggccggcatttcggaagatatcatcggccttacgctgatcgcgctggggacgtccttgccggagctggtaacgaccctgaccgccctggcgaaaaaggaacacaacctgtcggtgggcaatatcatcggcgccaatattatcgacctgacactgattctgagcgcgtgtaccttcatttctccggaggggctgatggtcagccatcagaccctggtgatggatatcccggtcatgatgatcctaatggggatcgcgatcgtgccggtgctgctgtatgggcggtttcgccgctggcagggcgtcgcgctggtggcagtatatggggggtatattgccaagctgatgatcggttagtaaagagcggccgtaaggccgcttttaattttaacaaatatgaaataatttggcggtttattttacgtttctttcatatctatttttctgcgccgcaatatggaaagggtaatctacaaaggtgcttttgactattgcattgcagaaagggacgttgtacgatatgcgaaccaccgaggccgtaagcagagataccctggaagagtatgaggcattcgtttccgccagcccgtttgggcactttatgcagtcatcacactgggcggatgtaaaggataactggcgctgggatgcacttatctgccgtgacggggacggccgcatacgggggagcatggcgctgctttgcaaaaaggtaccgctggacgggggctgctttatctattccccccgagggccggtgtgtgatatgatggatgaagatacggtgctggcgctgctgggcggggcgcgtgcatatgctcgaaggcaccgggccgtggcattgaaggtggacccggatgtggaggacagcagcggctatgtggccgcgctttttcaaaaggcggggctcaggcacggcaaaccgttgagccattcgggctgcatccagccccgaggcgttttccgggtggatttatacggtcaaacgcaggaaaggctgctggcgcagtgccggcccaaaacgcggtacaatatccgcctggcgggtcgccgcggcgtgacggtgcgccagggtacggtggaggatctaggcgaattcacccgtttgatgcgccagaccggcctgcgggacggttttccgacccggaacgagcgctattttgaaaagatcatgctctcctttggcgaaaaggtgcatctgtatatggcggattatgagggcgtacccattgccggcacgttggctttgacgtatggggataaatcgtggtatctttatggtgcgtctggtaacgagcaccgggaagtcatgcccaactatcgcctgcagtgggagatgatgcaggctgccctgcaagatgggtgcgtttgctatgatatgcgcggcgtgcctggggacaagcccagcgtccccggccagagcacatatggcttataccgctacaaaaagggctttggcgggcgatggatgaccttttgtggagagtgggatgacgtgctgcgtccagccgcttacggcttgatggcgctggggctgcggctgcgccaggggcgtgcgcaggcggcgctgcgggttaaacgcgcacgcatccggttgcaccgctcgggcggcgggggcgcaaaaaaggaaaaaggatttgaaaaaaattatggcgaggaatttgtatagatggtgtgctgcggcgctttgcgccagcctgctgattacggcggcctgcgccccgcaggaagaagaactgctgccggaggacgagtatcaggtaaacgaggtcatccccggtgcgcagcaggatgagccggagcctgtggtggtcccggagcaggaggacaagctggccccggccgggtacgatatgtacaagctgggttattttgccaaagaacacattggcccggatgagacgctgtataaagccgtgtttgacgcggtgcaagagcaaaagaccgagctggacatttcggcgtttggcgccgatcgcggggcggtggaaaaggtagcccaggcgctggaggactgctatgaattcggctactttgcagggctggagttgggcgaggatggcaagacgctttctatcctttatgagggagatctggagcaaggggagcaggaccgggatgccttccgggcaaaggtcagcgagattcttcaggttgtagctgggcaggagcgcccggccgccagcgccgtgatggaactgtaccattacctatgcgccaatattacgctggataccgagagcggggaaacctacagcggcgcgctgcacggcctgttggatgggcgtaccgatgcgttggggtttgcgcagctgatgcgctacctgctcgaccagatgggggtcgaggtgtatatcacctttggcgaggatataaaggatgtgtggaataccgtaaagatcgatggggagtacttccacctggatgccgcgcgggaggcggaggcggacgctgggcaggcgtataagtattttggcctgtcggataaagagtttttaaagcgcgcggccgcggccagctggagcagcggcaaagccgatggggtcacttacgaaacccctgcggcaacgggtaaccgctttacccccttgcagggctataatatcatcgcggtggattttgccggggaacggtattacaccatcgataccagcggcgagggtacgcctattgcggcgtatgacctgcgcacccatgaaaagggcacggtctatacggcgcaggcggctaacctggccttttataaggggctgctttacttttccgatacggcggacgggttaaagctcaaatcactggagccggaaagcgaaacggtcgccgcggtggccgatttggaagtgacgcggttattgtgtaaggcggacggcgtttatgcctatgacgatgtgaggggcgaagaaacgatcatcaaaccggaataagcggagcgtgtgaacggtaattgtgtaataaagcacaatttgcgcgcctgtattttggtaaaattgcgcattttatttagtcctacagctgtgctacaatgaagctgatcttcattggtatcagaagtatggacatgtgttggacgcataaccgtactttttacttctctctgcttgataaccggatgtataatcgcgcgcctttccggcgcgcgattatgctttaatacggaatttttattggctaagtttcttaaaatcgtaagaaactggcagcgaaattgagataagtttgtaacaactatctgttacaattcatctcataccatatgcgggaggggtgcacagatggaaagtaagcggattttgattgtggaagatgaggtgccgatcgccgagctgctggcgtacggcttaaataaagaggggtttgaagtggccgtcgcccatgatggcgcgcaggccctgcaaaagatcaaggatttttcacccgcgctgatgctgctggactggatgctgccggatatgagcgggctgcagatctgccgcacggtgaccgaggaccagaatataccgatcatcatgctgacggcgcgctcttacgtggaggataaggtgttagggctggaggccggcgcggacgattatatcaccaagcccttcgacctgcgcgaggtcatcgcccggatcaagaccatcctgcgccggcaggatcgggataaaggggagggcggccaggaggaagtgatccatatcgccgatctcacgctttacccgcttgagatgttggtgatgcgcggggaggaaaaagtgaacctgacgcccaaagagtacgagctgctgctctgcctgatcaaaaaccggggcagagtgctcacccggcccatgctgctggatgttgtctggggctacgaatactccggcgatacgcgtacggtggatatccacatccagcggctgcgcaaaaagctgggcctgggggactatatcgaaaccgtttttggcgtgggctataaatttatcaagtaataaaggggacaggctatgcgcgtgcgcggaaccatccgggtcaaactggtcgcggggatctttgccatcttcgtgtgcgcatttttagtgatcaactattacagttaccggcagatttccctcaataatgagaatattatcaccgaggagctttctagcctccgcgggaccagcacgctgtatgtgcgccaggcctttgtcatcaataaccgcaacaatagccccgaggatttccgccagtctgccgaggagatcgtggccgagctcaaaggggtaagcggtattccggtggaagcttatacccccgagggggcggcgatccacagccagcgccgccagatcgatctgcaatctcccgaaatgcgggatctgctttatgccgtgcaggataaacaggccatgaccattacgccgacggagaacgacggggtcatggtctattattcgtttccggtggtgatagaggggaataaggtgggcatcctgcgcttttccaaggattataccaccctttatgagcaggggtaccagatcagcgaggcgattttgctggtgacggtgtgcgtgttcctggctgcgctggtgctggccagtctgcttgccagcaacctggccaagcccatcgtccggctgacccgggcgaccaataaggtcacctcctggctgacgcaggaccacgagtttgaccgggcagagctggaaaaatccatcaacacccgccggcgcgatgaggtgggcgagctttcgcgcaacttttataccatggtcacccgtatcgaccagcaaatcgagatcatccggcaggaccgggacagcatccaggaactgtacgagcataaaaaaatctttatggacaacgtcacccacgagctgaaaacgccgctcacggcaatactgggttacgctgagctgattcgggataacggttattccgacccggtattctttgataaggcggtgcagcacatcatccacgaaagccagcggctgcacaatatggtggtgcgtctactggaaatgtcgcgcagcgcctccaccgcgcaggagttgcagggccgtgtggatatcggcaaactgctggcggatgtgtgcgagaccatgcgctttaaggcgcagcgttatgaggggaagatcgagtgccgcacggagaccggcctgatcgtccgtggcagcgcggaacggctgaaagaagtgatgatcaacatcctcgacaatgccatcaagtatggccagcccggcacggagatacaggccgctgcgttttacctggaggcggaggatgcggtggtgtttgccacccgtaactggggcaaggggatgacggaaaaggagatcgagcgcatttttgatcccttttatcgtgcggataaagagcactcccgggagatgggcagctctggcttggggatgagcatctccaagcagatcgtcgacgagcacggcgggcgtattgctgtgcaaagttcgccgggggagaccacagtggtttcggtcatgctgccccgccttcatcaaagtggaaaggaggcaggggaaaaatgagaaagaaaacggcccgtttgcgtagcgggatgcggtgtatagcggcgctgtgcggttttatgctcctgctgtccggttgtacggagcgcacgcagcttaaaacggtgattattccggagagcgaagaagtagcccaggcggaagcttccggagcaggcggggattatggcgagatcaaaaagatctaccgcaacgctattggcgggctgctgaacctggataaaaaaagcctgggcagccagtctttcaacgatgcgatccgcattctgggctggaatgacgaaaacagcatccaggttgcgtcctggtcgtttgacgggaacaacgatgtgacggtctatgaggtggattaccgctataatttttacagcaaattggtggaacttaagggcgtacagagccgggaccggatcgccacctcgcccgatggtgagtatatcgcctacacggaaatacaggacgagagccagacccagattctgcacttggtcaatacccgcagcgggctggaccgggagttgctggtcggcccagtgtggtcgcaggacccgatactgacctggtcgggcaatggtcgctatctggcgctggtgtatgatggggtctcgcaaacctatgggacctttcaaatgctcatggtctacgatacccagacccagcagttccgcggttatcccatggaagggtggtacagtaaatccggaaagcaccaggatctggtggcgacgccctgcaacgagggggattatgtggcgctgtgggtatacggcacccaatcggcgtttatcaacctggagaattacgtggcgctcagctttgagagcggaaagctgacaggcgatatgatctatgagcgttatatccagtcggccaccgctgcgctcaccgatgaacagatgctaaaaaagtatgctgagatgtacggacttgaagcgggcgaggtgacggatgctaatggcgcgcaaacggataaggtgctcgataagatagcggaagagatgcttaaaggccaaatggtgatcagtttcagcgattaccagaaaggcttccgggctgagagcgtagcctgggcttccggccaccgcgccttggtcacctttggggaggaattgtactgctggactccggggcaggatatcctgggcgaatttacgcaatggacaagcgcgggcagttctacgcttagcgatatcgttgcgagttgtatttcgcaggatggagacgtgctgttttatgctaagagcaacggcaacctgtatgtgctgccgctagaggatggcgcgcaggagcccagcaagcagcctgtgctggtctacagtggatttgattgcgacaatagcgccaccagctggaaccccggggcgaataagctgcttacctgcggatacgaccgggttaaaagctatggggatgtcgaacagaagtatctgatcattgagtttggggatgcgcaggccgccacgcaggaagatgacctgctcgaaggcgtgcagccctccgccagcacggcgccctaagagcggactgccggcggcaggatttgaggttgaaaaagaggctatgcataaaagcatagcctctttttattttaagcctattttaaaaatttgctccaggtgaaatattcggcgatcagagaaacgccgccggctaccaatagcaggctgatggcgctggtcaggatataagtagccccgccgggggagagcaccaaaaacaggcccaccgctacaaaggctgcgccggatatcagtcgcccccaggatttatgagcatataccttgcgggaaaagatccagttgattaccgtgatggcgccatagaccaataggcagatgcccaagaaaacggaaaaagccatcaacgtaacccgggggttaaaaaggaagatcagcccgatcaccaaacagatcaacccctgcgccagtagcatgccctttccgcccagatcggttttcgtggaggcgtaatacaacaggccgtaaaccaccgccgtgatcaccagcgcgatgccgatgggcacagtaagcagcgccgccgcgcctgtggaccagaaaagcgtgacgatccccagaatgatgatgagaaatccgcttaaaagcgtgacccattttgtaaaagaaaaatgatcgaacataaaaccgcctccatttaaaacggagatgttaccgctttgccgcatcgccgtccatgtacttatggtacgctatccactatcgttacgcaagggtgttttgcgtattctttagttaaaatgatatgaagatcaacccgccggtaacattgcccggcaggggaaaacccctgtaaaaatagcgcactctaagaaaaaccgaaagtttgataaaaatttaacaaaaggcattgacaggttcgccgcaatattatacaataagcgcgtagggaagattgataaaaaaatcacaaatatacgtgaaggcaagaaagaggaggtttcattcatggcagagaagaaacaggcggcggctcccgcggtcaacgttcaggctgaagtggacgcgttggtggccaaagcgcaggtggctcttgaaaagttcgtcttctatacccaggagcaggtggatgcgatcgtcaaagccatggccatggcggggttggataaccacatgaagctggccaaattggcggttgaggagaccggccgcggtgtgtatgaggacaagatcaccaagaacatgttcgcgaccgagtacatctatcactccattaaatataacaagaccgttggcgtggtcgatgagaacgagtatgaggattatgaggagatcgccgagcccgtaggtatcgtagcgggcgttaccccggtgaccaaccccacctctaccacgatgttcaaagcgatcatctgcatgaagacccgtaaccccatcatctttgggttccatccttccgcgcagggctgctcggctgaggctgcccgcatcgtgcgggacgcggccatcaaggccggcgcgccggaagactgcatccagtggatcgagcaccccgccatcgaggcgaccaatgccctgatgaatcatcctggcgtatccatggtgctggccacgggcggcgcgggcatggtcaaggcggcgtattccaccggtaagccggcgctgggcgtaggccccggtaacgtgccctgctacatccacaaatccgccaacctcaagcgcgcggcgacggatctgatgctctccaagacctttgataacggcatgatctgcgcttctgagcaggccgtcatcgtggataaagagatcgccgccgattttgaagcctttatgaaggagaataagtgctacttcgtgaatgacgaggagcgcgccaaactcgaaaaatacgtgatcaacctggaaaaaggcgcggtcaacgcggccatcgtgggtaaatccgcctatgagatcgccaagggcgcgggcctgaaggtggatccggataccaagatcttgatcgcccgcttagagggcgtaggccccgagtatccgctcagccgcgagaagctcagccccgtactggcctactttgtagtgaacagcgaggaagagggcatcacccgtgccgagcagatggtggaattcggcggactaggccactcggccgtgctgcactgcgatgaggagcgtaaggatctgatcgaggcctatgcccggcgcatccatgtggggcgcctcatcatcaactcgccttctagccagggcgctatcggcgatatctacaacaccaacctgccttctctgacgctgggttgcggcagctacggccacaactccacgacctcgaacgtctcggccgtgaacctgatcaacaagaagcgggtagcgaaaaggagagtcaacatgcagtggtttaaagtgccggagcgcatttactttgagccgggtgcgacgcagtatctgagcaagatgcccgacatttccagggcctttatcgtgaccgaccccggcatggtacagctcgggttcgtggatcgggtgctctacttcctgcgcaaacgcgagcagtacgtgcactgcgagatcttctcggatgttgaacccaacccctcggtggatacggtataccgcggcgcggaggccatgcgcctgttcaagcccgatgtgatcatcgccctgggcggcggcagcgccatggacgcggccaagggtatgtggctgtactacgagaacccggacatcgactttaacgccttgaagctgaaattcatggatatccgcaagcgcgtttacaagttcccgaaactgggtaagaccgccaagatggtggcgatccccaccaccagcggtaccggttccgaggtgaccagcttcgcggtcatcaccgacaaggagaaggatatcaagtatcctctggccgactatgagctcacgccggatgtagcgatcatcgatcctgagttcgtgatgagcctgccgcccacgatcacggcggataccggtttggacgtactgacccacgccatcgaggcttatgtatcggttctggcttccgactataccgatgcgctggccatcaaggccatccagatggtgtttgagtacctgccccgcgcctataagaacggcaacgatgcggtggcgcgcgaaaagatgcataacgccagctgcatggcgggtatggctttcaccaacgcgttcctgggcatcaaccactctctggcccataagctgggcggcgagtatcccatcagccacggccgcgctaacgcgattttgatgccgttcgtcatcgagtacaacgcgcagaagcccaataagttctccacctggcccaagtatgagacctttgtggcggaccagaaatatgctgagatcgctaaagccctgaacctgccctgcaagacggtggaagagggcgtcaagagcttgatcgccgccatccgcggtttgatgaagacggtaaacatcccctcgtccatcgcggagaccggcaaggtcgacaaggccagctttatggccaacgtgcccagcctggctgaccacgcctacgaagaccagtgcaccacggcgaacccgaaacagccccgcgtgtctgagcttgagaccatcttgaagcgcgcgtatgaaggaaaataatagcgcttgcgcgcaaagtgcatatggcgttatgattaacttgcctaaagacgttgaaatgggctaacattttaggagggagacagtcttaaaaaggccgtctccctcttttttgcggagggtaacatggatatcgtaatctgtattgggagttcctgctttttgaaggggtcaaaggacattatcgcgatcctggagcggctcatcgccatgcataacctgaaagataaggtgaacctggtggggtcgttctgcatgggccgctgcacggagggcgtgtgcgtgaagatcggcgaggagtttttctcgcttagccctgcgaccaccgagagcttttttaacgaacaggttttggggaggattgaggcatgaacccgatcgaatcgatgaaggcggattgcaaaaactgctataaatgtttaagggcctgtccggtcaaatccatccggttcaaccatgaacaggccgagcttttaaaggacgagtgcatttggtgcggcgcctgcgttaaggcttgcccgcagcatgccaaggctgtgcgcagcgaagtggataaagtacgggatatgctggagcataaccatcccgtggcggtatcgctggcgccttcgttcatcggctcgtttggcgccgatgacccgatgaaggtggtagctgcgttcaaacgcctgggttttgcgcaggtgcgggagacggccgaaggcgcggcgatggtctctgacgagctggtcaagatcgccaaaaccggtaagatggataatatcattaccacttgctgcccctcggtcaacgagttggtggaaaagcactatccggagcttgtagataccatggcgccgctggtctcgcccatgatcgcccacgcccggctgatcaaacacgagtcccccgataccaaggtggtattcgtgggcccttgcattgccaaaatggccgaggctgaggatgtgcgccacgaggatgtggacgcggtgctgacctttgaggacatggaaaagtggtttaaagaagagcggctcgacctaaacgcgctggacgccgcgccctttgacgggcctgatgcgggcctggcccggatgtatcctacctgcgcgggcgttatccaaaacgcggtagcgcggggcctgacggggtatgacacgcttcatgtggaaggggcggaggaatgcaaagagctgttccgcgccatccaggcgggcgagattcacggctgcctgatcgagatgaatatctgccagggcagctgcatgggcggccctaaagccggccaggagaagcgtaaccgcttcaccggcgcgctggcagtagaacagtatgccaaaaagtctgcccagcctctggggacgatcccggagcaggaggccatctcgcttggcaaggtgttcgtcaaccgccgcaaggaactggcccagccggacgaggagaccatccgttcgatcctgcgctccatcggcaaggagagcaagatggatgagctcaactgcggctcatgcgggtatccctcctgcagggcaaaggccatcgcggtattccagggcaaggcggagctgtccatgtgcctgccgcacatgtgccaggcggcccagtccatgagtaatgtggtgctggattctacgcccaacgctatcgtgatcgtcgatgaggaaatgaagatcaaagaggtcaatagcgccgcgcaaaagatgttcagggtttcccgtcaggaggcgctggagcgctccctttacgagtttatggacgcgacggactttgaatacgtgttacagaactttgatgcggtcaccgataaaaaacgcgagctggacgaatttggcgtggtggtacgcgaaacgctggtctacctgcccaaacagcatggcgtcatgggcatcttaaacgatgtgacccaggatgaggagcaggaaaaggcgctgtaccagctgcgcgtggataccatggatatggcgcagaaggtcatcgacaagcagatgatcgctgcccaggagatcgcaagtctgctgggtgagaccacggcggagaccaaagccacgctgaccaagctgaagaccatgattattcataatggagaatcgcaattatgatgatgcatatggatatcggctataagagcctgaacaagtttggcgaggaattgtgcggcgataaagtggagatcgttcgcacggaagattcggatatccttgtgctttcggacgggttgggcagcggggtcaaggccaacatcctctcctcgctgaccagcaagatcatcattaccatgctcaaagaaggcgccaaggtagacgaagcggtggagaccatcgcccagacgctgccgatctgtaaggtgcgccacgtggcttactccaccttcagcatcctgcagttgtatcacgatgggcgcgcttatctcgtcgagttcgataatcccgcttgtattatgatccggggaggcgagatcatcgagccgccctttgagatccgcgagatcgccggaaagaccgtgcgggaaagccggtttgacattgctatcggcgatatgtttacgctgatcagcgatggcgtgattcacgcgggcgtgggcgcaattctgaacctgggctggggatgggaaaacgtttccaactactgcctggatttggcgcggcgtgatctatccgtgcccagggcggtttcctcgctgatccaggtgattgataacttttatatgtccaagcccggagacgattctaccgtgctaatggccaaggtagttccccagcaggtggtcaacctgttctcaggcccacccaaggataaagccaaggatgaagagttggtgcgggactggatgcgcggcaacgccaaacgcgtggtgtgcggcggcaccagcgccaatatcgccgggcgcgtgctgcaccgtgaggtgcgcacctccctggattttaccgatccgctgatcccgccgatcgcctacatgcagggcgtggatctggtgaccgagggcgtgttgaccatcaaccgcacgttggagattctgcgccagatcaagggaagcgaggtagatccgctcagcttaaatgcgctggatgcggacaacggcgcggccaaactggccagaatgctgctggaggaatgtacggatctgcatctgtttatcggcaaagccatcaaccccgcccaccagaaccccaacctgccgatggacctgagtattaaaatgcgcctgctcaacgagctggcggacctgatgcgggcgatggggaaaaacgtcaagatttcggtctactaaggggagaaagtggagagcagcatggttaaagtagaaaacgatgccaaaaagaataagtaccagaccttgcggcgtgtggctgagttggcgtttaccgatcaggtaaatgaggagcatctggaggccattccgggggagttgatccagggctctcagccccatttccgctgctgcgtgtataaagagcgggagatcatccgccagcgggtgcggctggctaccggcaagctgcccagcgggatgaaagagccggaaggccgccagaatgtcatcaccgtgatcccggcggcctgcgagggctgccccatcaaccgctaccgcgttaccgagaactgccagaagtgtctggctaaaaagtgcatgaatgcctgcccctttggggctattaccatgacggggcggggcgcgtatatcgacccggacaagtgccgcgagtgcggccgctgcgcccaggtgtgcccctataacgccattgcagacctagtacggccctgcaaacgctcctgtccggtaggcgccatctccatcaacgaggataagctggcggagattcaggaggaaaagtgtatatcctgtggcgcctgcatgcgggattgcccctttggcgcgatctcggaccgctcttatatgctaaaggcgatcgagtggatccgcagcccctatcccacttatgccattatcgcgccggcgctggaaggccagtttggcccgaatgccagcatgggcaagctcaagaccgcggtcaagctgctgggctttacggatgtgatcgaagtgggtctgggcgcagacgcagtggcccagcacgaagccaaagagctgctggagcgggtggaggccggcggaaagatgaccacatcctgctgcccggcgtttgtggagctgatccgcaagcattatcacgccctgattcccaacatgagccatacggtttcgcccatggtggccacggcgcgctggatcaaggaaaaggagcgggatgccaaggtggtctttatcggcccctgcgtggcgaaaaagactgaatgccaggatgaaacggtggagggcggcgccgattgtgtgctgaccgccgaggaattgctggcgatgtttgacgccaagcgcatcgatcctgaaaagtgcgaggacagccagcaagatgcctcccgctacggcaagggctttgcccagtccggcggggtgaccggagcggtgctccaggcgctgaccgaacagctggggacgacgccttccatcgtggcgcaccgctgcgacggcgctgcggaatgcaaaaaggcgctggcgatgctggccagcggcaaattcccggcggactttatcgagggtatggcctgcatcggcggctgcggaagcggcccggccatggtgcaaaacgagcggctgtatcagcagacccgcaaaaagctgctggccgaggcggatggccgcacgattggcgagaatctcgcccagcacgggatggaaaaaatttcgatggaacgatagttttttgtataggtgcaatttgaaagccgcagggtctttaccctgtggctttttgcatcatcgaaacgatttgctttattattgaccgatcggtctatttatgctatcctctattatagactgattggtctataatataactaaaggagcctaaagccgtgaagaaggcggaaaaaacggagttgacccgggaaaagatcatcgctgcggcgctaaaagagtttggcgagcggggatacgagggcgctacgttgaacaccatttgccaaaaccatgatatctccaagggtcttatttaccataactttaaaaataaggatgatatttacctgcattgcgtcagcgccgtgcttaaaacttttatggcgtatgtcaaacagcatagcacgggcggtgcgctggcggagtacatgggcttgcgctatcgctttttttcggagaatcccggcctttctcaagtgttttttgaggcggtgctgcagccgcccaagcaccttgcccaggcgatccgcgaacgaaaggtggaatttgatgcttttaaccaggagatctactgtcgtgcgctagagaagttgacactgcgtcagggcgtgacgcagcaggaggcgctggagtattacaccatcgtacaggagatgttcaacggttattttgccagccccgcctatgagggggccagcctctcggataaggtgcaggatcatgaggcgaagctggcccgtattctggatttcatgctttacggcattgcaaggggtgaatcgtgatgtttttaatgcttttacgtttggcgctaacgatctttgcggcttttatcctgggtaagctggtctctaaactccgtctgcccgctatcctgggctggctgctggccggtatgctgctagggccccacgcttttgcgctgctggacgaggctatgatgcaagagaactggtacactgtagcggtacattgcctggagtgcgccgtagggcttctgattggtacagaactggtgtggagcaagatcaaaaagacggggcggcagattctgatcaccaccctgacccaatccatgggtgcttttttggtcgttaccctggtgtttggcgcggtattttacttcgccggcattcctctctatctggcggtgatcttcggcggcatcgcgctggctacggcgccggcgccggcgctttccatcgtgcgggaataccatacggacgggccggtgacccgcaccctgatccccatggcagcgctggacgatatggtggcggtggtggtattcttttccaccatctccatcgtttccgccggcctttcggagcagcagatgccggcctatatcatcgtgctcacggtactgctaccgttggtgatcggcgttttaaccggccttttggccggctgggtgctgaagaaagagcgggggcgggcggccacgctggcgctgctcatcgctatgctgctgctctcctgtgccatcgggcttatggtcaatacctattggctgggggatgccgggctcaattttatgctgatcggcatggctttttcggccacttttgccaatatcgttttccagaagagattggagcagattatgcacgccttcaaacgctcctgccgcattcgggcgtatcgctggtgtttaccggttttgcggtttccacgctcagcggccccgcaccggcatgcgccaagatcattcaggggacgatcgccgcggcggcggtgataaacgaggtgatcgcggtcattatcgccaaaaagggctttgaatgggcgggcgagctgaacaaaaacaaagatgatgcagatggagcagctcaactacagccgaaagcagaatgaggctgcgatatgcgcgccgatcgtataaagagaaaacgctacacactggaaagctgggctgatccagattaggattcgggcagcggtactttgcatccaatagagaaggcaaagcaccgctgttttgttattatgaacaaactgtaaattcaacgaataatgaacacttgtttgatttatcggttgaatagtactttttctccatgataaaatatctaaaaataaacaggagtttactagtgcaatatttaaaagaggaaacgcgccataagattttgtccgtggccctgcgggaatttgccgccaggggttataaggacgcgtcgatgcggcagatcgctgccaaggctgagatgacggtgggaaatatctaccgctattatgataataaggcggccctgttcgatgcgctggtgagccctgcgtgggagcagcttaaatcggtcatcgtcatcgataagcgcatcggcagcgctggggggatgacaccgcacaacctgccggtggcccagatcgcccaggaaatcatccggctggcgcgggattatggacaaaagttttatatcctgctttttaaaagcgagggttcgccctatcaaagcgcgtacgaccggctgatccagcgcattgccgagcgctttgagcaggagctttttccccttgtaccggttgaggcgcgggaccagtttttgcccgagctgttggccaagaccatcgtggatggattttttacgatcatggatacctgtggggatgatccgacgcgtatggaaaagctgtttgggcagttgttgggcataatgctaaaagatgttgaccagagaatgaaaggataggggacaagaggatggaggaacgatgaagcaccagtattttaaaaggcggtggagtgtcctgatcgggtttgggacgctgtgcctgatctgcctgatgctctggccgctggtcagcgtaaactataacctgagcgcttatctgcctgaaagcagccaaacgcgccaggcgatggcggtcattgacgaagaattcggccttagcggcgcggcccaggttatggtggaggatgtatcattccaggaggcagtggcgttaaaggagcagatcgccaaggtcaaaggggtaaaaagcgtgatctttgccgacgatatgatcgacgcttatcagcccctggagcaggccgacccggcgctgctggagcaatactataaagaggacgcggccctttttcaggtggaatttctgcaagacgactattcgctggaaacagaggcggcgctggacggcatacgcgcgatcgtaggggaaggggccagcttttcggggtcatcggtcaacgccgtagccatgcgggatgccaccgtcaatgagctggccaccatctcgctgtttttgatgccgatttttatcggcatcctgatcctgtcctcgtcgtcctggctggagccgctgctctatctggcggtgatcggcgtatcggtgctgatcaacatgggcaccaatctggcgcttggggacatctcctttatcactcaaatgacggcggcgctgctgcagctggccatttccatggactattcgctgttcctgctgcaccgcttccgggagtgccgcgggcaggggctggaaccggcaaaggcgatgcacatggccctgcgggaatcgcgctcttcgttgttcgccagctgtttgacgacagtggccggctttgtagcgctgatgttcatgcagtatggcattggcgcagatatgggtctggtgctgggcaaggggatcgtcatcagcctgctttgcgtcctgtttttgctaccgcccctggcgctggtctgcgtcaaggggttggaccggacggcgcaccgctctttcctgccgcggtttgagaaactggggcgcgggatccttaaggcgcgctggcctattttagcattggcgttgctggttgccatccctgcatttttagggcagggcgccaaccgctttgtttatggggaaacttcgctgctggtcagcgagggtacgcagatcgcgcaggagcaggaaaagatcgcgcagcgttttggcacctataatccactagtggtgctggtggaaaagggcgaccggggcaaggaaaaccagttggcacaagcgcttgtagcccgtgaggatgtgcgccaggtgcagtcccttgccacctctgtgggggtcgggatccccgatgagatgctgcccgccggcgtactggagcagtttgaagggccccattacgcgcgtatggtcgtgatgctggatcttccacaggagagcgaggagacctatgcggcagtagaacagatcaagggcaccctgcaatcctattatcccgatggctatgtggtgctggggcagcccaccagcataacggagattaaggcgctggtggagagcgattacaccatcgtcaacgcggtggccatcggcatcgtagcgctgatcatccttttcaccttccgctcactgctgctgccggtgctgttggtgttcgtcattcagctgtcgatctggatcaatatgtgtatcccctacttccagggcgcggcgatctcctttatcggctatatgatcgtatcggccatccaactgggcgcgaccattgattatgcgatactgctgaccaaccgctacctggacttccgcaggatacaggataaacgggccgctgcggtcagcgcggtggcggcatcggcaggtacgattttaacttccgcgggtatcttatgcgctgttgggcttacggagggctttgtctcctccatccccggcgtcagcgatttggggatgctgatcggccgcggcgcggcgctcagcggaatactggtgatggcgctgttgccccagctgctggtactgtttgataaagcgatcggcaagacgacttggcattggcgtagaaaaaagcaacaatccctggagaaaggaaaggcatgatgaagaaaaatacatttaagcgcgttacacagctggcgctggcgggcatcctgtgcgccgcctgcgcctggaatagcaatttacaggcggccgcacagatggaaaaagcccaaaacgcccaaccggttctaaaggatgaaacggtttacgtgacgctggacagccaggggaaccagcagggcatccaggtagtcaatcatcttttggtgcccgaggaaggaagctatacggattacgggcgctatacggctattaaaaacatgaccgatgatactgttcccgcccagagcggcgagcagatcgtctggaacctgccggccatgcctgagggcttttactatcagggcacgctggaaagcggcgagatcccctggaatttccagatcaactactggctggatggcaaaaaagtagagccgcagcagctggctggggcaaccggtaaggtggagatcgagatcgccgcccaggcgaacgaaaatgctgacgcgatctatcaggagcgatacatgctgcaggtcactgtgccggtggatatgggcaaggccgaggtcgtggcggcccagggggctacgcaggtggtcaccggccagagcaagcagttggcctttacgttgctaccggggcgttcgggcaccttccgcattgagctttcagcgcgggattttgagtttgatgggatcagcgcggcgatgatgccggcggatctgtccagttatttcgatacggatgaagtgaaagagggcttctctcagctggaggatggcgccaaggagctggcggacggcacacaggcttttgcccagggcatggatcagctggccgaagggacgagcggcctggccagtggcactggggagctggatgccggcgcaaaagctctgcaaagcgggatgaaagattatgccgatggcctttctacctatatcgaagagctggaaaagctggcccagggcgcgcaacagttaaaagatggcatggcccaggcgggcgacttctcccaattgaccgaggggtttgaaggggccgtacaggcgatggggcaactggccctgacccatgaggaaaaagcgcagttccagcagttaatcatggccgcacagcagcccggggctagccaggaaacgctgcaggccgctcaggccgctatggcggcgttgaagctggatggcgccatcacgcagatttcgggccagctgggcaatgcggcccagggcgtcggcgaggcgcaagcgggcctgcagacgctgatcgaaaagtatggcgaattaagcgacggcctcgccgcgcttccggatggcgcgagggagttgctgggcggatttaatgaacttaaaggcgggcaggcgcagatcacctcgggcgtgagcgaactaaaagatggtgcaaaaacgctaaacgaggcggtctctcagttgcctgaccaagcggaaacgctcagcgacgggcaggggcaactgtacgagggcatcaaggaggctggggagcagatcgaggaaatgctgccccagagcgatggcgaaatcgcttataccagctttgcctctgcccagggcgtagcgccgcagtcggttcagttcgtggtgcagagcgcggccatccgcgtcgaggctcagtccgcacaggaaccggatgaaccggaagcggaagagaattggttcgaccgattactgggcctgttccgctggaattagcaaaccgtagtttggcaacttaccctccgggcaatcatttgcctggagggtttttgctgtagatagccttaaaaagcccgcgctgtttggtagagccgggtcgcatttcttttaaatgtttgaatgaagttactcttcgccgttataagagagtgcaacaagaagatattcgaagagacgtacgataaagagccgtttgctgacggggatttttaaaaagtggttgatctcgctagtcaaaaagcagatcagcgcctgcttgtcctccggcatctcgcccaacccggaaaacagtagcgcttccggcgttacttccagtcccttggcgatcctgtccagcgtgtctaacgtcgggttgccgcgcgcatgttcgatctcgcgcagatgggagggacttaggccaatcgtattggcaaattcctcttgggacagatcgcaacgctgccggtattttttgacgttagcggccagggtttcgttcgtttccataataatccgcctttcgttttaaactagtaagatcatacgaaattcgacagattttgacaagatgagaacacgtctgccacccgccaacgtatagttggttgtaaatataagataaatggcgtttagcactggttttcgggcaataacgtctggattaacgcctgtagatcgtcggttcaaatcgcaaaaaaatattttaaattgcataatttagtttttttgaataatatttatacgcttattcgtagtacgaaaaaatgactatacgcgtgtaaaaaacaactgtacgtatgatcggcgcgatccggaagggcttttttaatttgccggttgggttgtatattgtgcatgagttaatttgctggaggatatagtttaacagaaaataataaatgaaaattgataataatttattgacaatcaataaataacgtgctaatttagaactgccggccacataagggcggcagtaaggagatgatgcgcggtggataaccagcaaaccttaaagatagaaaacggaatgacggcgcctggtatggagggaaaatgggccaaacgggatggtgtattcgtgatagcttttctggcttgcgcctatctaatcgtggacttttttctttggagcggttttgccctgggggcgacggtagcatatggcgtgctgtttctggtgacgtccgcttacctggcagttcggaagataaggccccagccctttccggcattttgcggggcggcttcgctggctgcggcggcggtatttaccgtcaaccacgatgttgggatgaatgttctgctgcttttgatgatcgacctgctttacgctatttttatctgcggcgccgctggccgcctgagctattggacggggagctattttttaggcgttgacctgtgtaagaatttgattgcggtgccgctggcgcatctggcggaacccttaaaggcggtgctgggactttggcgcagagatggcggcaaggggcgtgaagttaaggttttgctgggactggtgttggccctgccggtggttgcgattaccgtgccgctgttgatccagtcggacgcggcatttcagggattgatggagggactggccgaaaacttgggggagctgatggtcaaggtcgttttagccgtgttgctgggcatctatatcgccgctgtgctttgcatgctgcaccggcgcgcgggggagcgcagccagcctggggttaccgtgcgggagggacgcttccgcgtaatggatgggacggtggcctcggtattcctgggggcgatctcggtattctatctggtctacctgctttcgcagctggcctattttttcagcgcctttgccggcatcctgcccgaggggtacgcgtttacgccttcggaatatgcgcgccgcggtttttttgagatggtgatgatcgcgctgatcaacggcggcgtgctctcgctcagctgcattctggtcaagcgcaacgcaaaagatgagattcccgcgccggtcaaggggttgagcttttttatcgcgctatttaccttgctgctgacagcaacggcattttccaagatggtgctgtacatccaactgatggggatgacgcggctgcgcgtattgacctccatttttatggtcatgctggccatcgctatcttggcgctgattgtacggctttttttccgccgctttccgtacatgcgggtaatcatagcaggctgcagcctaatgctgctgtgctgcgcctatgcggatgtggataccatgatcgccaaaaataatatcgcggcctaccgcgccggtgcgcttgagcagctagatgtgctctatctgggcaggctttcggccgcgaccgtgccccagctggaagcgctgctggaggacgagaatgccgccgtgcgcgacgatacggcgcgggtcatggatgtttgggccagccagcgcatcgtaaaggacgaggcaggtaacctcgtcccggcgccctactaccttgagtttaagaattataccttaatggatcaaaagatcaaccaagtgctgatcagccgctataccgattatgcgggcgccagccgcagccagcactatctggattccctgtatggcgaagaatgcttctgattaacgcaattcgcccgcttggggcagggtgacctcgccagcaaaatttgtggcaaagatcttgcgcaccgcctccagatcggcttcttggcccaaagcccacatcagcttggtcaccgcggcctcggtggtcatatcataaccggggatcgcgcccttttccaaagcaagctggccgggtttgtaaaggttcaggtcgctatgctcgtataggcattggctgcataccactgtggggataccctggcgcgtcaaccgctccaggctgtcggtcaaatcccggcggatcacatgcatgccgccggcgccaaaggcttcaatgatcacgcccttgtatcccaaattggccaacaggttcaccacatccgggttgaagccggggatcagtttgatcaaaaatacccgcttgcatagcctaagctccggcgaaaacaactgggatgggcgtttaggtaagtgtgcgttcaatacaagcccgcgggcgtttacttcaccaacgtagggataattcacgctttcaaaggcgtcaaatcccgtggtgcgcaccttgaccgcgcgcgtgcccaggatcacctttcggtcaaaggccacaaacaccccgggcttctggctctgcgccatggcaagggcacagcgcaggttctcacttccatcgcttaaagggcggctaagcggcgcctgcgccccggtaaaaaccacggggataggacaggcgcgcagcatgtaggagagcatggccgccgtataggccagggtatccgtgccgtgggtgatgacgataccgtcataatccgggcaggcctcgatcacggccctggcaaatgcctgccattcttcaggctgcacatcagagccatccagctgagcaatgggctggatatcaacctcacaggcaggctttagggcgtctaccgcggtgcggaccattgtagccccggcttcaggctccagacctttgcccgcagggcgggatgcgatggtgcctccggtagttaaaattaagatcttacgcataatttacctcacaaatattgacgcttcggcaacttgccctgggcagctgcatagattttagctaagaggggaggacaagatatggccagaagcaatgatcttcagcaggtggcggtactgaacctgacgggatgggaggcacggtacgccttgatcgggctggcattcgccagcggaatgctggccgcggcttacagcctttatccccggcactttgccattcagggcccgcttttgctgcgggaggcgctggtgctgacggcgctggccggtggaatggggctcatcaaacacctgctggcaaagttgaccggtgcaaagcataagggcggcaacccgcccctctatacccggggcggccttgccgccgctgagctaatccccacattgggtacggggctggccgtactgcttgccaacctcctggcgccacccacgcttttctggacgttttatatgctccaggtggccaatctgtccagtgcggtgggcaacatccataccgcgtaccgggtgatgcgcctgcccggacaggtgcgcataggccgcacccggcaggggcttgtcttgtaccagcccgcatccgaaggaaacttacaggaactttagcatctcgttaaaatttgccttttcagtctccagcagtttgtttgcaatatcgcgcacgcgctcgtcctgcccgtcgtaggctttcaggtgctgcgtggccttgatgatgcccatggcattgccctgcgccatcatttcggccattttttccggggaacggtccaccatcgtcttggcggaggccatcacgtgggaggatgccttggccatagcgctgacgggctggagctgcacattgcgttcgtccagcatatcctcgcaggcgtgcagcaggctatggtattctttttgctgcgcacgcagcgcgctattaaaaccctgtgcttccggttccaaccgttcgaccaggtgggagatgccttccaggcccatttcagtgttttggtagacgaaatttaacatttcttcatcgttatacatcatgttcacctcgccattaggatgccgcagcgcgccaggattatgctatcgctacccgtttagttggtatttgtaaattatggatgaacttttacgtaaaagggcatgatagcattgcaattggacagcagggcgcggtacaataaagctaaagattgttaatttttaaacaaatggagggatgttcagatggctaagatcattgccagccccagccgctatattcagggtaagggcgaactgaaaaatatccgtacgcatgtagaaaaactggggaccaaatggtttatcctgaccagcccgtctggcaaaaaacgggtggagccggccattggccagagcctgtccgactctgaatgtacggcggtctatgaggattttaacggcgagtgctgcgacagcgagattggccggatcaccgaggtctaccagcgttccggatgtgacgtggtgatcggcattggcgggggaaagatccacgatactgcaaaggcggtagcctacggcgtaggcgcgccggtggtgattgtgcccaccatcgcctcgaccgatgcgccttgcagcgcgctttccgtgatctatacggacgatggcgtctttgaccggtatttgttcctgccggccagcccgaatatcgtgctggtggataccgatattgtggcggccgcgccggccaggctgctgatctccggcatgggggatgcgttggccacctattttgaggcgcgcgcctgccgggattcggatgcgggcaactgcgtgggcggcaaaacgactttggccgcgatgcagctggcgcgcctttgctatgatacgctgctggccgatgggttccaggctgcgctggcggtggagaaccacgtgtgcaccaaggcggtcgaaaaggtgatcgaggccaatacctacctgagcggcatcggctttgagagcggcggcctggccggcgcccacgctatccacaacggattgacggctatcgagcagacgcataagctctaccacggtgagaaagtggccttcggcacgctggtgcagctggtgctggaggatgccgccatcgaggagctggaagaggttctggacttctgcatgtccgtggggctgcccaccacgctggcggatttgggcatcgagcaggtggagcccgaaaagatcatggaagtggcccgcctggcctgtgcagataccgataccctgcaaaacatgccctttgaagtcaacgccgatatggtgtacgctgccattatgggcgctgatgcgctgggcaaggcctataaggatgaataatggataaagctatagatataatgttgtagggcagttttagactgcccttttctttttatgaaaattttctgatgttattgatttttttgcagatgtggtatattttacttaaataaaagtattaaacatgagatatattcacatccctgaataaatatattcgtaattgtcttcaataaaaacatttaaacttaaaagagaataaatacatgaaggaaggtggaaatgttctaatttctattttatagccattttttaaagaaaggaggagtttgaaatacacaaacttaataaaatcggaggtcggtaggatgcgacattatatcaactcattgttagttgcggtttattttattgccatcaatttcttttatgctgatgcattcagggactattcctccaaaagttttatggtatcgggtattgatatgatgctaacggccatagtggtttcgtttattggatcattgctttttaattttacggagtggatcacggttttcaaatccaaacctattaggattaggttcccgtacctgatcaccagctctttgttttttattctcgcgtttctacggttctggaatcaaactattttagcaacaattcaaacaccactagcatttgcgcttcctgtattattggaaatatttttcccattcatatcaggctgtcttttgatcaaggcgttccagaaaggagaatatttatgaaaaaaatagtttgtttgtgtttagtcatatccgtgcttgcaatcaatagttttgtaggattggcggcaccaaaagaatttaatcaattactaaaagttgaggtgcacagtagcttaaataagttagaagtgatcccaactgatgacgaaagcataacttgtgctttaaatggaaatgatttgtatatttttgaatcgagtgttgtcgataactatggagaaaaatctcgtggtgtgattggtaatgaagctgaaactgtatttgaacgggatgctgttgttgaaacaaatatatcaaagatcaacttaactgatgaggaaaaggctaatatagaaaatgagcccattttaagaagtggtagcttaaccaggactgaccaaaatcgggacaatatgggtacatgcacagcatcgcttaaagttacttattcaaaaccttcagggcgcttgcatttgtgcaaggctacagggagcgctactacatctacctctgagggcgttagagcgcaatcatcaaacctgagctataatgcggtaggagaccgatacattaatggtgtttggtctgataagcaagactctggattctccaggaattatagtacgcctggatttagtaatgtacagttgatggctgagagtgtatcgtatgatgttcatactgcaggtgtaagcttactgtttattgttcaaggggggttacggtaacggtatacatgccattttactgagagctgaattcatactatacgaaagcgcgacccgacagggccgcgctttttgtgcataaatgactatcaatactttatttttcgccgtatatctagtaaaataataatgcgctggatttgcacaagatgagggagaggatcaccatgcgtaaactgggacgggaatttaaggagtttatctcgcggggcaatgtaatggacctggccatcggcgttatcatgggcagtgcgtttacggcgatcgtcaactcgctggtaaaggatatttttacgccgctgctcggtttgctcacgggtgggttcgattttgaagccttagccatcacccttggagagggagagaacgcggcgcagatcgcctatggcgcctttatctcggcggtgatcaactttttgctgatctctatcgtggtctttatgttgatcaagactatcaaccgcttccgccgcaaaaaggaggaggaggcccccgcgccggagcggctgtgcccttactgctgccagcccattgcccagcaggccacccgctgcccgcactgcacctcggttttggagggggaaagcgttgtggcgcaggacaactagtgctttaaatacaaaatgaattcgggccgcgtttccattggggagatgcggctcatttgtttctcgatagatatataataatcctttggcgccgcaaccaattccccataacaaaaaggattgcggtagtgtaacgcgaatttatatttctataggttacggatggaggcggaaagatggatgctgcgaggcttgcgctggcgcgggagaacgccgcggacatggccaggcttttgacaaaagaggatattgcgttcctcatccagtgcctttacgagcgggcggatgcggtgcgctatccggcgtttttgctgcttaaagcgcgcagcgtcatcgttgaggacgtatgcccttactgggaagaggtagcggcgcttctggaggacaagaacagctacaggcgaaacatcgccctttggctgattgcggaaaacgtgcgctgggctggaacgacggcatttaaggcagtttatccaacctatatggcccgattgcaggatgaaaagtttattaccgtgcgccaggcgatccaggccatcccggcatgggttccctatgcgcccgctctggcggaacagaccgcgcagcagcttttagatatgccgcttacgccctatagggacagtcagcgcccgctcattttagcagacagggtggcggcgctgatggctatcaataggttggcgccttctgagcgggtccgaacctttatacttgacgcgataacgggcgggatgctggactctaaaagagcgcgtgcgtttaaggcggaattggatggggagctggggcgcaagccttaagcaatagatcgatagaatgaagggggattgacagatggcactttggcattggtgcaatacgggcaggctagcggatacggacggaaagtttttacactcccatggcgggcatatcctgctggcggaggacggctattactacctgtatggtgaatatggcgagttttccatgacgcggcaggtggggcgcaaggtatcatgttaccgctccagaaacctgacgcattgggaaaactgcggcgtggtgctctcggtggatacgccgcgggccgcgtatcatttgaccaagcacaccaaccctaccctgcagcgcaaccccggccctgcgcaggaggcgcgttgggcgggctggaacgaccgggtgcaggtgggcgcgaccatccagcggcccaaggtgctgtacaaccccaagaccaagcggtatgtgatgtggatgcactgggaggatggaaaggggttttattacgcccacgctgccgtggcctcggccaaaaggccggaggggccctatacctatcacggcagctttcgcccggcgggggagatggcgcgggattgcaccctgttccaggacgatgacggtacggcctactttatcgcggcgggccgggacaatgctgatttgtatatctaccggctgaccgaggattatatggcggtggacgagtgcgtcaaatgcctgtttcccgatcagttccgggaggcacccacgctgtttaaacgcaatggggtgtatttcatgctctccagcgagtgtatgggcgccgagcccaaccagggcatgtacagcttcagccgggagttgacgggccggtggtctgcacagcggccgctgggtagccccaccacttatgatacacaaccggcgttcgtgttctccatcgatacgccgcagggcgcgcagtacttttacgtgggagaccgttggaatccctcggaattctacagggatgcgcgctatatggtgctgccgctttatttcccggatgataccagcattgatatgcgctggtgcgatggctttacctttgacccggccaacggcacgctgcaagaggaggtgcgggagactggattatcccgcatcaaaagccgggtggtcgaaagcaagggcggttatctctatcctgcgggggacaaggtgggctgccgcaagctggactatcgggaggaagcgctgctctggcggctggaacctgcaaatgagggccgatactatatccggcatgagaaaagcggcctgcgcctgacttatgggctggatggaaagagctgttttttggccgcggcagatacgggctataaccagcaattcaatatcgaagcgctatttgacggcgcctgccgcatcctgacgcaggatggcctggcgctgacagtggaccaggagttgccgcaggcggagatggccctggggcttgccccgcgccgggagatctacgaccccgcctggggctgtgacccgcaggcgtttaacatcaccacagtctaccccaacgattagagagatagcgatcaaaaagacgatggcttgccatcgtctttttttatgtaaaaattgggccggttttggaggctatatgcggcatagccgcatggcaagggtcataggaataaagaggagaggggggatgcctatgccgttgtcggatcgggaactgttggcacggctgattcggtgcgaggccggcggcgaaggcgaaaacggcatgaaggccgtagccagtgtggtcatgaaccgggtcaacaccccgtatggcgaatatgcgcgcatcgggcagggatcgatacgcaacatcatctttcaggagcggcagttcgtctgcgcatccgaggtggaaaacgggcagtataacccgcagaatatcttcaatatcccggccgagcagatccattacgatattgcggactgggctatcgcgggtaaccgactgctgaacctggggtcggccctatggttttacaatccctattcgcccaattgcaggcccaattttcctagcgaggtcggctactttgtggtgcggataggagaccattgcttttataaccctaccagcgcgtattttgacacataaaacagttgaaaggatgggatcatatggctttacaaccaaaccaaaacattgggggcaaccaggccggggtgccgggcaacctgggcgatatcatgcaaaaccagacgggcaatacggatttccccgagaatgcgaatcagttcttctacgagtccttctccgaggtgctatcaaaagcgatcggctatttcgtcgtgtgtgagtttttgatcggcaatgccattatagaaaaaacaggcatcctgtacgcggcgggtgtaaactttgttacgctggaaaatcccgccaacggcagctttacggtctgcgatatctactcgctcaagtttgccactttttatgataccaccgaggttcccgaagagtttgccagtaccatgggtgccgttaccgcagccaataccaacacagcgcccgccaacaacggcttcccgcagcgcaacagctatcaaaatccctatttgccgcgccgggggaataacggctaccgttaagcttttaaacaaaggcccgcagattattctgcgggcctttgttatacttcttaccggctgatccgcctttggcggctgagcagtaaaccgatagagaagatggcggcggcaaatgccagctggatacccaatgcctgaaagatcggctgcaacgaggcggtatcgatccgggtcagtccggcgatgttttccaacgcgtctacataccagtaggccggaagaaattttgataccgccagcacggagctgctcatcacgctacgggggacgaaaacgccgcacagaaagctcatgcccagggtcagtacgttggagatagcggactgaacggtggcgttgcgcacaaaaatccctatcaggaagccgagggatgcgcagactacggaaaacaccagcgcgttgaggctgagcagccctaaaagtcccgattggagcaaggcgcctttatacaagataaggccggtcagggtcaagagcagccagcaggccagggtaaagatgccgttgcccatagccagttgcaggttgatgctgcgcagggtcagcggggagcataggttgcgccgctgcaggttgggttcattaaagtgcatcataatggtgcccaaccccaggatcaccatgcccaaaagcacataagccagaaacttaaaatagaaaatgtagccggccgtttcctcaccggccaggctggtgttttgcaggctgaccggggtttgcgcctgtaagtcctctaacgtagcctgcacggcccggtcggggtcatgaagcgccttttgatagagctgcgccgtggcgaggtactggttgatcagcgtatcggcatacatgccctcggtggtgtcggggatggagatcttatccagcgccacgtttttgccctgggcaaaaccctggctgaacccatcgggcacgatcaggatataggaaacgttgcggtaataaatcgcgtcctgtagggtctcgatatcgtccggcagctcgaccagcgtattgctcgttcccaaatgctcggctagcccgtcgacaacggcggaggggccatcacgattgatgatagttagcttgatcccctcctgcgaaaaggcggcctgttcgctgtcgctacccaggaaggtaaagccgatagctaacaccaggaatatgcctaagtagatcgccagggaaggaaataccttgcggatgagcttaaagtacagcctaaatacttgcatagcgattcctccttacggccagataactgccgatgccgaaaagtgcgccgtagcccagcagcaaagcgatattgacgataaaccggggaccggcgccaaacatatacaggctgtagaacccatctgaaagcagggccgcagggttgatatattggagcgcaggcgcgtattgggccacgatatttttcatatccgcaaacatcagcccggctaaaaagcaaaggaacagcgtgatagcgatcaatagccctgtttttatactttcctttatcttcaatacggagccaacaaaggtgccaaaggccacccccataaagcaacccaccagacaaagggagagcaggggccaaaggtgcgtgcccagggatatttttaagacgaaggccaggtaggctagggtgatcaggatgatcgtataatggatgagcagcgccgcagcctcgtcggccagcattcctttgagcttatgggtgggggccagattgcgccgcgcgccgatggacgataagtccgcctgaatatcggtggcgttgcgcagcccccaaaagctgccgttgaggcagaccatggccagcagggcgtaaaaataattgagaatggtatctggcgaagcatcgctaaaggaggtctcgcgcagataattgcggccaaagtccgcatcggccaaagcctgttgggccgcggcggggtccagcgccgccaggtgcgtaacggtggccttgatccccacatactggtcgagaaaagctttgagcacgctttgcgtaaggccggattgacgcacggccagggtgggcgtatcccctggggtgatcaccccggaaacagccccctcctccaacagggtatgggcctgctgggcgctggctaggcgcatatccagcagcgcgttatcctggggcaaagatacggcggacagcgtttcctggagcagcgtatccccggcataggcctcgttgtcgactacggcaacgggtatggggtcaaaaacaatgtcctggtcgctatgcagatggccaaaggccacgaagaacagcgtggataacagcagcgggaacagcagggtccaaaatagtgtagacctgtcccgcagcaggcacttcatgcgtgcgataaataagtttttcatgataagcgcgcccccttaatcccgcagttccttgccggtgatctccagaaacacgtcgttaagggtaggcagctcggaaaagactcgcccaaaggccacgtcccactggcgtagcgcatccagtatcgtcaccagattatgctggccgccggccttgcagcgcactaccagccggtgatcctcaagttttgcggaggctacggcaggcagctcgcgcagtttggcgacgatctctccgggctgcccctctaggtcgatgcgtacggtctcaccccggttgatcatggctttgagttcctctttggtgccggtagccagcgtgcggcccttatccatgatggcgatgcgggtgcagagctgctccacttcctccatatagtgggaggtataaacgatggtagcgccctcatggttcagctgggcgatgccctctagaatattgttgcggctttgggggtccaccgctacggtgggctcatccagaaagatcagacgcggcttgtgggcgatgccgcaggcgatatttaaccgccgcagcaacccgccggagagcttgcgggggtagaatttgcaaaaatcctgcaggcctacaaaatcgatggcctcctgtaccagctggcggcgtttgtcgcgctcgggcacgtacagggcgcaaaaatagtccacgttttcgtaaacggtcagctcctcaaataccgctacattctgcatgaccacgccgatattccgcttgatgtcgtacgcattaggggccatgggcttgccgaacaggcggatatcgcccttatcaaatttgagcagggccaggatgcagttgatagcggtggtcttgcctgaaccgttgggccccagcagcccaaatatctcgccctcctgaatattgagattgaagtgatccagcgccagcagttctccatagcgcttgaccaggttttgaacttctatcaaagccatggcatgtgcctcctttattgcctttatgcccttattatagcctgcgtgccggcggggcaggtagtgccggcggtcaattccccggggtgatgaatgtcacattttccgccgggacgattgtgcgcgcggcccgaaggggatacaataaaaaaagcggataaaagggaagggggagcgtgcgtgctgatcgataaggcgatgctgttggtctgctgtatgacggtgatggcgcagcggccgggcgcgctggccccgctgcccctgctcgtgggcatatgcgtcagcgctctggcgggatattttgacgaccggcgctttaccggcgccgtagcgctgggctatgggatgatctgtattttcgcgccggagttctgcgtttttttgccgctggtgttttacgatgtggcgatcgtatgcccttggccggtgggggtggccctggggatactatcgcttgccgggccgctgttttcggccgaccttctggggatcatgacggtgctgttcatgggccttgggtgggtgctgcgccagcgcacgctggccttagagcgtgcaggggcaaaatttaaccgcatgcgggacgacagccgcgaattggcgctgctgctggagcagcgtaataaggagctgctggaaaagcaggattatgagatacgcctggcgacgctgaacgagcgcaaccgtatcgccagggaaatacacgatcacgtggggcatatgctctcccgctcgatattgcaggtgggggcgctgatggccctgcaccgggagcagccgctcaacggggagcttaacggcgtgcgagataccctctcgcaggccatggataatatccgcgccagcgtgcacgaccttcacgatgaatccatcgatctgcagatccagctgggacagctgctgcgggatttcagcttttgcccggtcagctttgtgtgcgatgtgcaggggcgcatggccaaggaggtacagtattgttttatcatgatcgtaaaagaagcgctgagcaatgtgatgcgtcactcggacgccacgcaggtgcgcatcgaggtgatcgagcatcccgcgctgtatcagctcatcgtacaggataacggcagcccgcaggtgcgcccatcaaaggatgggctagggcttaaaaatatggccgagcgggtggccgcgctggagggcaacctgctgatcagccgggaaaatggatatagaatcttcgtatccgtacccaggcaaaggattgaggagggataggcatgcgcgttttagtggtggatgacgaccggctggtctgcgcctcgttaaagaccatattggaggcggaaggggatattgaggtcgtggccatggggtatgacggcagcgaggccgtggcgctttacagccagaagcaaccggatattttgctgatggatatccggatggagaagatgaccggcctgcaggcgggcgagcagatcttgcaggcggaaccccaggccaagatcctttacctgaccacctttttagatgacgagtacatcgtgcgcgccatcggcctgggggctaagggatatattctcaagcagaaatttgagagcatcgtacctgcgctgcgcgccgtgcagatggggcagaatgtgttcggcgatgagattgtgaccaaattgcccgagctgatggcccagggcgggcaaaaagagtttagccaatatgggcttagcgcccgggaagaagagctgatggcgctggtggccaagggactgagcaaccgggagatcgccgcccggctgtatttgagcgagggcacggtgcgcaattacctcagcgcgatactggataagctgcaactgcgggatcggacgcaactggccatcttttactacgaatcgggccgggttttgcggcggtgaattgtaaatgggatcatttagaggcatcctctccagttttggagaggatgcctttattgcgtataaagataaagggctgcttctctttggcgatgaaaaatgaacgtcagatccagccgaaccgtttgcaggcgttccaaatcccatcccggtcgcagcggtcggtcacatagtcggccagggccttaagctccgggcaggcattgcccatggcgatggaaaaccactggtcgccaaacatctggatatcgttcatgccatctccaaagaccaccacgtcgctgtagggagcatccagtgcatccatcatctttttgatgccatcggccttgctggtgggctcgatcatcagccggtccggcgtataacgtacgtggggaagggtaccaaaatcgatgctgctctcccactcggggctgcaggccaccatcagcttataaaatgccggctgggccgtatagtcaaaggccgggtcctcaacgatgccaaaataatcccggtcgatagcccggcggtagcggccatccggcgtgacctgctccagctcgttatggatcaccgcagcccaggggatgcccttttgttccagttggcggataaagcgcacgcaggccggtacaggcaggctctccatggagagcaggcgcccgtttagggtgacgctattgcccccatcggccaccagggtggaaatgccgatgcgctgggcgatggccagggcgtctttttgcagacggcccgtagcgatggatacaaagtgcccggcggcgcgcagctgtgcaaggcaggcctgtgtgctggcaggcaccgtgcggcttaggccatagcacagggtaccgtcgatatcaaaaaagaagtatttcttatccatatattcctcctgcccaatttaaggcctacgcttgccagtttagaacctgcgcggcggcctgtcaatgttcttaagtcattttgccgcaacggcagctgtaatgtggggagatttgggttataataaaaatgtaaaacgacttcaataaaggagcatcctaaaaaagggggagttgggccgatgaagacggtgctgatcgtggtggattaccaaaacgattttgtggatggcgctttgggcttcccaggcgcggaaaagctggagggagcgatctgccagaaaatcgaggcggccgcacaggcggggggagatgtgatcttcacctttgatacccaccgggacgattacctggaaaccaaggaggggcgcgacctgccgataccccattgcctggaagggaccccgggctgggaactgtatggacgagtgaaggactgccatacgccgcaaaccaaggctttttacaaagagacctttggttctctggcgctggcggagtatttaagcggcatgccctatgaacaggtggaactggtggggctggtcagcaacatctgcgtgctctccaacgccgtactggcgcgggccgccctgccgcaggcgcgcatccgtatcgacgcggcctgtaccctggggccggacccggcgctgcaccaaaaggcgctggatgtgatgcaggggttggggatcgaagtttacaaccggtaaatttgtgtggcgtgttgcggcaaaaatgtataagttgaataattaatcaaaatgggcggataatcggttgaattatccgcccttgaatgttaaacttatttttgcgtagcccgttttaacgtggcagatgaacgacggggaagggatcagcatatgaccgagcggccaggggaagagttgacgctggcaaagggcgtaaaagatggtttgcccatcgcatttggttatgtttcagtagcctttgcctttgggatgctggccatcgaaaaagggctgccgctatgggcgcccatcgtgatttcgttgaccaattttaccggcacgggccagtttgtgggcatgggtatgatctttaccaccgctacgctgctggaagttgcctttaccatgctgatcgtcaatctgcggtacctactcatgtcgctttcgctgtcgcagcgcattgaaccagggatgccgctttggaaacgggtcatcatcgcctttggcaatacggatgagatttttgcggtatcgatgcagcaaaaccgggcgctcaacttccggtacatgctggggttgatcttatgcgcttactccggctggatattgggcacctgcattggcgctatggccagctcgcttttgccgtttgcgatacgcagcgcgctgggtattgcgatctacgccatgtttatcgctatcatcatcccgccggcgcgggagatgcggccggtagctatcgtggtagcgctggcggtgggcttaagctgtctgttcaaatgggtaccgtttttaaatgccatgggcagtggttgggctattatcatctgtggcgtggcggcatcggccgcgggcgcgctgctgttccccatcaaagtcaaaaaagagggggacaagcatggactataatcgcattttatgggtgatcgccgtaatggcggtagtgacctatatcccccgcgttattccgctggcggtttttaaaagaaggatcgaaaacgtctacgtccagtcgtttttgacatatatgccctatggcgtactggccgccatggtattccccgaggtgctttattcgacggcgaacctgacttctgcgctttgcggagtggccgcggcgctggtgttggcctaccgcaagctggggctgctgcccgttgcgctgggggccacagcggtggtctttgtcgtagagcaggtgatggcgcttttagcttgatacgtacgggataaacggagttaaaatggaccagactaaatataaaagagagggagacaaaatggagaaacgaagtaagttttccggtaagctgggctttgtgctggcggcggctggctcggccgttgggttagggaatatctggcgctttccctatctggcggcaaaatacggcgggggcgtctttttgctgatctacatcatcctggtggtgaccttcggctttgccatcatggtggccgaagtgggcatcggccgcaaaacggggctaagccccatcggcgcgtttagcaagctgaataaaaagtacacctttatcggcgtactggcctcttgtgtggcggccatcatcctgccgtattacagcgtgatcggcggctgggtcatgaagtactttaccctgtatgccaccggtaatcacgcgcttatggcgggggagaacttttttaacagctttatcggtgaatcctggcagccgctgatctggttggtgatctttatcggcatcaccacggctgtggtgttgggcggtgtgaaaaacggcatcgaaaaggccagcaagattctgatgcctgtgctgatcgtgctttccatcggcgtagcggtttattcgattaccctgccgggggcgatggagggcgtaaaatactttttgctgccggatttctcgcgcttttccgggcaaaccatcctggcggcgatggggcagatgttctattccatgtctctggccatgggtatcatgatcacatacggctcatacctgcgtaaggaggatgacctggaaaaatctgtttctcacatcgagtggttcgatacgggcatcgcaatcctggcaggcttcatggtcatccctgcggtattcgccttctctggcggagaccaggcggccatcaacgccgggcctggattgatgttcgtgaccctgcccaaggtctttgagcagatggggctgggaacggttatcggcatggcgtttttcctgctggtgttcttcgcggcgctcacctcggctatttcgctgatggaagcggtggtggcaacccttcaggataaattcaaatggtcccgtgtgcgggccacgctgtcggtggcggtattcgccatcctgctgggcatcccttcttcgctgggtaacggggtctggagcaattttaagatcttgaatatggatttcctctccttcatggattttatgagcaactcggtcatcatgccgatcgtggcgctgctgacctgtgtgttcgtaggctgggtcatcggcaccaaggtgatcagcgacgaggtgaagatctcctcccgctttgcgcgtgaaaaggtgtttaatgtcatcatcaaatacatcgcgccgatctttatcgtgctgatcctcatcagttcagttttggacggtttgggtatctggaagatttagcggaaaaagatttccccgcgcagctaatgcgcggggattttttatctacatttccgcataaagcaagacgcataaggccacgtcattttgataaactatatcgtgtattcatgcggaatgcgcgaagggacgaatgttgtccgctcaccaattttaaatgaatcgaaagaggaacatatggccaatagactgcaaaacgaaaaatccccatatttgctccaacacaaggataatccagtggattggtatccgtggagcgcagaggcgtttgaagaagcaaggctgaagaataagcctgtttttctcagcataggttactccacctgtcactggtgccatgtaatggcgcatgaatcctttgaagatgctgaagttgcgcggattttaaaggacttcgtctgtattaaggtagatcgtgaagaacgtccggatattgacgctgtatatatggatgtctgtcaggcaatgacgggatccggcggatggccgctaacgatcctgatgacaccggagcaaaagccgttctttgcgggaacctactttccaaaggccagccggcgcgggcaacctggtttaaccgaactgttaatgcaggtaaaacagctttgggagcatgaccgtgaaaaactgatagaggcggggaatcatattaccagcttccttttgcagaacagaaaaaaggatgcgatcgaacctgataagtccatcgtaatggaagcctacgagctgcttaagcaaaacttcgatgcccaaaatggtgggtttggaggggccccgaaatttcccactccgcacaatcttttgtttttacttcgattttaccggcgtgagaaaaagccaaccgccttaagcatggttgaaaagacgcttagcaacatggcaaaagggggaatcttcgaccagatcggcggcggtttttcgcgctattcgaccgatgaaaaatggctgatcccacattttgagaagatgctttacgataacgcgctgctcattccagtctacctggaagcttatcaattgacaaataaagaatgctatgcgcaagttgcccggcggacggcagagtatatcttgcgcgaattgaccgatcccgagggcggcttctattgtgggcaggatgcggatagcgacggggaggaagggaagtattatgcctttacgccgaatgaaatcgaaggggttttaggacgggaaaagggcgcgcaattttgccgccagtacggcattaccttaaaaggtaactttgaaggcaaaagcattcccaaccgaatcggacagaatgctcaagaaggccgcgtagacgattcggcgattgaaaaactttatgcttaccgaaaacagcgggtagacttgcataaagacgataaaattcttctctcttggaacgcgtggacgataatcgcgcttgtccgagcgggattgatcctgaatgacaatcgctatttgattgcggcgtcaacggcgcagcgctttattgagacgagaatggcggatgggcgcaaccgcctgttccatagattcagggacggcgaggcggcacatgcagggcagcttgacgattacgccgtctacgctttagcgcttttagaactttacggagctaccctggatgcaaattatctaaaaatggctgtccttcgtgcagagcagatgatagacttatttgaagatgaggaaaatggcggatacttccttagcggccgtgacgcggaaaagcttatcgcccgcccgaaagaactgtacgatggggcaattccatcgggtaattcggtcgccgctgtagcgttgggccgcatggccgctctaacgggaagcgtgctgtggtgggagcgggcggaccggcagcttcgctttatttccggacagattcgcgattatccagctggttattcgtttgcaatacttgcaatcatggcttttttatatccgcatcgggagctggtctgcacggggaaaaccttgccggaacaattaagagaatacctccaaaagtatccggcagacgaaatcagtatcatttataaatcagaacagaacgcgtcgcttttagcggagctcgccccgtttaccgcagattaccctatagaacaggctacattatattatctgtgtgaaaatggcgcctgccgtacgccggttgatgattttgagcagttgcccctggagatgtaacgatggccgcccgaaaacacccctgaaataaaaccccctgaaatatcagggggtttgtggtgccgaaggcgggacttgaacccgcacggtgtttccacctcgggattttaagtcccgtgcgtctgccgatttcgccacttcggcgcaatatttgcgctaaaaaatgccacaaaagaacggatataattataccttgccatccgctacttgtcaatattggataaatatactgcgggcaaagcgtaggacgcacaagctgtcgacttttgttcgccagcgtggtatagtctgactagatatgtgttgaaaggagtagagtggtatgccattctctcgcgaaacgttggactttttggtggaaaaccgcttgcgcgatagccgggcatggtttggagagcataaggccgagtatcaaaaatgggtgatccagccgctaaaagagatggtggaggcccttaccccgcatatgttggccatagatgatcaattcgtcacccagccgcgggtagataaaaccatcagccgcatttggcgggatacccgctatacccacgatccctccctgtaccgggattccatgtggatcatctttaaacgcggccggatgcacgccacggaagtgccggggatttattttgatcttggcccttatggtttcagctacggatgcggtttttatcatgcctctaccggttatatgaatacgctgcgccagatgattttgcgggatgacccggcatttaaaaaagcccaggccgcctatgcgcgccagcgcattttcgccatggaaggggaatgctacaagcgcccccattattcggatcagccgggcgaaaaggccttgtggttggagcggcgcaacatcggcttttcaaaggagagccgggattttgacctgttatattcggatcggctagcccaggtggtggcagacgatttggcgatgctatcgccggtataccactttttgctggctgcagcgcaggaggaaaatatgcgtgatgtaggccatgccgccttggaggccgagaaataacccacccaaggacaggaagcataaagacagctttaaatcattttgaaccgggcgtctgccatcatagcggcgcctggtttttttatatccaaagcgagtataagtacatttggtaaaataaattgtcacattttgtcaaatttccggttgacatttatctaatggctagatacactaatgataaacttgtgggatatatcgccaaatctttatgtagcaattcttaaatgcttttattgtctatggacggagatgtctttaaaatgcaagaaaaaacttatctagcgcatgtagcacaggatggccggcagcagaccatacaccagcaccttgtaggtacggcggcgttatgccgtgcgttttcctcgccgtggggtgcgggtgatcagggtgaatggctgggattattgcacgacatcggcaagtactcgcaggcctttcaaaaacggctgttaaatgacggcccgcgggtagatcatgcgactgccggggcttatgagagtgcgatgcgcaggcagatgatggcggccttttgcattgccggccaccacacgggcctgcccgatggcggtagccgtatcgacctggagggagcgacccttatggcgcgcctgaacagggccaagagcggcgagttggagccatacacgccctggagcgaggagatcaccatccctcatgcggacctgcctgcgttcatcctgcaagaccggttggctgcagccttttatacccgcatgatgtattcctgcctggtcgatgcggactttctggatacagaggcctttatggccggggaagaggtactccggggcggtggcgaggatatgccagcgctggagaaaaagctggaacgttatatcgcaccctggttcccacccaaaggcgcgttgaaccgtcaacgctgcgcgatccttcgttcatgcatggaaggcggcgagggaagccggccggggctgttttcccttaccgtgccgacgggcggaggcaagacggtggcctctttggcttttgcgctcaaacacgccagggccaatggatttaaacggatcgtctatgtgatcccctacacctccattatcgagcagacggcagaagtgttccgcgatatcctgggggatgagaacgtgctggaacatcattcgggtgtgctgtacgatgtaggggaggaggcgcggccggagaccatgcgcatggcccgcgccacggaaaactgggatctacctgtggtggtgaccacagccgtacaattttttgaatcgctttatgccagccgctcctctaagtgtagaaagctgcataatctctcacagagcgtcatcatttttgatgaggcgcagatgttgcctatctcctatctacgcccttgcgtacaggctatcgctcaactgatcgcgcattacggtgcgtctgctgtgctttgcacggcgacgcagcccgcccttgcgccgatttttgcggaatttctgccgggccgggctgcccaggaactatgccccgaggaagtatttgcagacccggtattccggcgggtgacctttcgcaacgcgggcctgctggatggggaggcgttaaccgcgcaattagaggggcatgatcaggtattatgcatcgttaacacccgaaaaagtgcgcgaaggatttacgagatcctggaaggggacggcgtctttcatttatcgacactgatgcggcctgtggatcgcaaaaagacgctagagaagatacgccgccgcctgaaaaatggagaaccctgtaaagtagtggcgacctcgctgatcgaggcgggggtggatgtggatttccccacggtatttcgggagcaggcgggcttggattcgatcttgcaggctgctggccggtgcaaccgggaggggaagcgccccccagcggatagcgcagtgacgatttttaaaacggaaggtaagataccgccgttgttttcggccaacattgcggcaggggaggtggcgatggcggcctatcaggatctatccggtaaagacgccgtgcgctgctactttgaagagctgctggacctaaagggcgcgcaggcgctggatgggcaggagatcctccctttgctggcaaaggagaacttccccttccgcacggttgcccagcgtttccacctgatcgacaacgagacgcggacggtttatgtccccgatgcggaaagcgcgcggctatttgaccgcctggaaagtggagagcgcagccggaacctgttccgggaactggggcaatatggcgtttccgtatacgataaccactttaccgcgttggagagcgctggagccctgcaggttcttgaggatggcagtgcgatattgaccgatccggccctgtatgatgcccggaccggacttgcgctgcatgcggatagcggacaggccttatttggatgatgagcagttaaaatgacgatagaaaggggaggagagccatgccggtccaactggaggtatggggagattatgcgctgttcactcgcccggagatgaagacggaaagggtgagctatgatgtaatgacgccctcggccgcgcgggggctgctggaggcgatctattggcacccggggatgcgctggatcgtggaccgtatttttgtctgcgcgccagtacgctttaaaaatctgcggcgtaacgaggtaaaatccaagatcagtgcccgcacggcgcgcacggtgatggagcggggaaagggagaattgtatttagccacgccggaggatattcagcagcgggcggctatgttgctggcggatgtgcgatatgtgatcgaggcgcactttgagatgacgccgaaggcctcgcctgcggataatcccggtaaatttcaggatattatcacccgccgcatgcgcaaggggcaattttatcaccagccctactttggctgccgtgagtttccggcccactttgcgccctgtgatgcaccgccggaatgcccgaaggagctgtgtggcgagcgggacttgggctttatgctttacgacctggattattcggatccggagaatatccatccgctgtttttccgcgcggtcctgcgtgacggcgtattgaatatacccccgcgcgacagtgaggaggtgaggggatgatcctacaggcattagtacagcactatgaggatctggcggccaagggctgcgtcggccggccgggatggggcctggtcaaggtctcctttgctttgtatatcgacggacaaggtagtttagttagagttgctgccacacaagaatcgccaacacacggcaaaaagactgccatggttccccaaaccatgcagctgcccgcgcctgtcaaacgatcctctgggatctccgccaactttctgtgcgataattccagctatatcctgggcgtggatgctaagggaaaacccgagcgggcgttggattgctttgcggcctgcaagaccctgcatgaggagattctatcgggtgttgacagcgctatggccaaggcggtactgaacttttttgaacagtggaaaccgcaagaggcacaggagcacccagccctgcaaccctattgggaggagattctaaagggaggcaacctggtgttccgtttcgacggcaagcatgcccaggaggatgaggcggtgcgcagggcctggcaaaaatactatgacgctgcggatggaggacgtcaggggatctgcctggtcaccggcgctgaggggcctatcgcccagctgcatcccgcgatcaaaggggtgcgggatgcccagtccagcggcgcttcgctggtatcctttaacgcgcccgcattctgctcttatggctgggagcagggagaaaacgccccgacgggggaatatgccgcctttgcctacggtacggcgctgaaccacttgctggcggaccgcgagcatgtttaccaaatgggcagtaccaccgttttgtactgggctgaaggggcagaatcggcttattcggatgtattcggtgcgctggcgatggatgcagaatcgcattattcggataaagatttgcagggaatgctgcacgccctggccaatggggaatccgtgttatatgacgagcagatgctggaccccaaccgtaccttttatgtcctgggcctggcgcctaacgccgcgcggctgtcggtccgcttttttctacgcaattcctttggggctttccttaaaaatatcgaagcccaccaccaaaggctggagattcagcggccaaactttgataaaacggtgcgcctgccgctctggcgcttgatgagcgagacggtcaaccaaaacgcgcgggataaatccccttcgccgctgatggcgggagaggtgctgcgggcaatcttggaggatacatattaccccgccacgctgctcaacggcgtcgtgctgcgcatccgcgccgagcatgcggtcacccggggacgggcggcgatactgaaagcctattatttaaaaaatactaataaagacgtaccaaaggaggttttaacagtggcattgaacccggagagcaaaaatgtaccctatacgctggggaggctgttttcggttttggaggcgatacaggatgcggcaaacccgaacctgaacgcgaccattgcggataagtattttaacgcagcttcggctacgccggcggtgatcttcccctcgctgatcaacctggcgaaaaagcaccttcgcaagctggaacgcggccagcggatctatttggaaaagcagctgacagaagttttgtccatcttgggagaaacctatccggtacggctgaatttgccgcagcagggttctttccagctgggatattaccatcagacacaaatgcgctatacgcgcaaggataaagaatagggagggtatgagcaatgagcgaagtgattaaaaaccggtatgagtttgtgatcctgtttgacgtggaaaacggcaaccccaacggcgacccggacgcgggcaatatgccccgcgtggaccccgagaccggcctgggcctggtcaccgacgtatgcctgaagcgcaagatccgcaattatgtggagatggccaaagaagacgcgacgggataccgtatctacatcaaagacggggtgccgcttaaccgcagcgatgcggaggcctatgcgaagttagaggtgacggagaaaaatatcaaggaaaagaaaaaggcggacccagagctggatcgcaaaattcgggactggatgtgcaaaaacttttttgatatccgcacctttggcgcggtgatgactacctttgttaaggcttccctgaactgcggccaggtgcgtggcccggtgcagttgggctttgcgcgtagtgttgagccgatcgtgccccaggaggtaaccattacccgcgtggcgatcacgaccgaagcggatgcagagaaaaaaggtacggagatggggcgcaagtacatcgtcccctacggattgtaccgctgcgaagggtatatatccgcaaatttggcacgtaaggtcaccggttttactgaggacgacctggcgcttttgtgggaggcgatcctcaatatgtttgagcacgaccattctgccgctcgggggaagatggcggtgcgggagctgatcgtattcaagcatgattccgagctgggttgcgcccctgcgcataagctctttgagcaggtgaaggtcacccgtgtaacggatgaggctgcaccggcgcgcgcctatgccgattataaggtgacggtggatgaagctgcactgccgcagggcgtcacgtgtgtgcgtatggggtgacttataacgaacaagagtttttgcagctttccggcctacagcacttttccttctgccgccggcaatgggcgttgatccatatcgaacagcagtggcaggagaacctgcgtacggtagaagggcagttgctgcatggccgggcgcacgatgaacagcagcgcgagcgccggggcgaagtgctgatcctgcgggggctatcggtgttttctaggcagttgggcttaagcggtaaatgcgacgtagtagagttccatctctcgcaagaggggataccgcttcagggggaggaaggacggtggctgccctttccggtggaatacaagcgcggtgaacctaaaaagggcgatgcggaccggttgcagctttgcgcccaggcgatatgcctggaagagatgctttgttgtaagatcgccgaaggggcgctcttttatggggagttcaagcgcagggtaccggtggaattcgatgcggcgctgcgagatgaggtggtccgcctaagcgcggagatgcacgcactttatcgccgcggccacacgcccaaggccaggcccacaaagggctgcaacgcctgctctttaaaagagctgtgcttgcccggtctggcaaaacatcgctcggcggcgacctatctgacccgatatatccaggaggatgaaccgtgagaaagctgctcaacaccctgttcgtactcagtgaagatagctacctggcgctagatggcgaaaatgtagtcattcggcgggaggggagtattgccgcccgctatccgatccacaccttagagagcatctataccttcagctaccagggcgcaagtccggctttaatgggggcttgtgtgcaacggaacgtggggctatctttcctgacgccacggggcaggttcctggcaaaagtcagcggagaggccaacggcaatgtgttgctgcgccgcgcacagtaccgcttggccgacgatccgcaatccagctgccggatcgcggcgtactttatctgcggtaaactctataacagccgttggatattggaacgcgctacccgggatcacgcgatgcgggtagatgtggaggccttaaaagccagttgccaacagcttaaagagctactgggccaggccagcacatgccagacgatggaggcgttaaggggtctggaggggaaaagcgcgatgctgtattttgacgcgctggaccagctgatattacagcataaagataccttttatatggcccaacgttcccgccggccgccgcgcgatccgtttaacgcgctgctctcgttcctatataccctgcttggacacgattgtgcttctgcgctggaagctgtggggttggacagttacgtgggctttttgcaccgggatagaccgggacgcacctcattagcacaggacctaatggaggagatgcggccggtcatggcggaccggctggcgctgacgttgatcaaccgccagaaagtaacgcaaaaggactttcgcaaggaggcatctggcggcgtttttctgaacgacgaagggcgaaaaacggtactatcggcctggcaggaacgcaaaagagagatcatcacccacccgtacctggaagaaaaactgccttgggggctggtgccttatgtacaggccctactgctggcccgcctgatccgcggcgatttggatgtttatccgccatttttctggaaatgaggacgttggtctatgctattgctgattacctatgatgtagacaccaccaccgcagccgggcggaaaaggttgcgcagcgtggccaaagtatgtgtcaactatggccaacgggtacagaattctgtttttgaatgcgctgctgacgccgcgcaggccaagatgatcaaggccaaattattagctttgatcgacgaggagcaggacagcttgcggttttacaacctgggggatcgctatcaaaaccgcattgaacactatggcgctaaaggcagctatgacccagagggactgctgatggtttagtgcgaaagtgaagagcacaggttttcccggggggattcgcaccagtttaaacgccgatatctgctctttgattggaatttaagcagatgcagggtactgtctgtattccggttgacgagaatttgtgcaagatgacgaacttttgaatgatgtatttgtgcacttttgctgtcgcaccccgcaaggggtgcgtgggttgaaatccgctggattttttactaccagaagaaccagaacgtcgcaccccgcaaggggtgcgtgggttgaaattgctaatcaagcctacgtaaataagatgattcaacgtcgcaccccgcaaggggtgcgtgggttgaaatctgatccaatcttgcctagtcatatcagtataccgtcgcaccccgcaaggggtgcgtgggttgaaattgggggttattttgaccggcaaaatcggggtctagtcgcaccccgcaaggggtgcgtgggttgaaattgggggttattttgaccggcaaaatcggggtctagtcgcaccccgcaaggggtgcgtgggttgaaatgacagtatcttgtttccgtacaataactacatctgtcgcaccccgcaaggggtgcgtgggttgaaataccgtatccttgcgcagatcctcgatttcttttcgtcgcaccccgcaaggggtgcgtgggttgaaatctcgatttcgatgtaatcgcatccccaatgccaccgcgtcgcaccccgcaaggggtgcgtgggttgaaattgtcagctctcgcatgctgtccgtcccctcgtcgtcgcaccccgcaaggggtgcgtgggttgaaataggtttttggccatatcgatattggccttgagcgtcgcaccccgcaaggggtgcgtgggttgaaatttggccagcgggtctggcgcggaagatgcctctcggtcgcaccccgcaaggggtgcgtgggttgaaatgtggattttatgcctctccaggacaacagcaaaaggtcgcaccccgcgaggggtgcgtggattggttatgctacattcgtctcctgagatctgacagaacagcggcgatgtcccgctggatgcagatggcgcgctgcccgagctgcggcggggcataggcctcgtgtacattgatgcaggcgtagaccgcgctgggatgctccgccgtagcaacccaaaaggggtacttgatgataccgggcgtatttgtgcccacgcccaactccaaataaagtacgcgcagcccttcgttgcgctgaatgaactcggcatatcgccgggcagcccgatgccagccggcatcttccacaaacttttcgtcgctgcgcaggtttacggtcatcggcctcccgcaaatcggacagtgagggatgagcgctgtggggatcttcatttcctgctgcgctgccagcatttgacggatctgagcctcgttatcataggtcagcggccggcagggctggctgcactggaaaaggccgtagtcgccttgcgtatagaatagacgctgcttatcaaatcccgccttttgaaaacaatggtctacattcgtagtcagcagaaaatagtctttatcccgcaccagttccagcagttcgctatagacgggcttggggatatccacatagcggttgtaatagatatgccggctccaccaggcccagtattcctctggggcggggaaagggtaaaatcccccggagtacatgtcctcaatgccatattgggctttgaaatcggcaaagtaacgttcaaaccgcgggccggagtaagtgaatcccgccgaggtagacaggccggagcctgcgccgatcaagacggcatcggctcgggccaactcctcttgtagacgcttaatggatgccgagtagctttcggtagatcgcaagatcgatggatttgtaaacattgaatatcaccttttccagccgctgatctttggctaaaaaattttgcacggtttctatggcgatttgcgccgctcgttcgttgggaaagcgaaacacaccggtagagatgcagcaaaaagccaggcttttcagtccccgctcggccgcaagttccagacaggcgcggtagcaggcagccagctgcgcgcagtgctctggggtaaggcgcgactgcacgatggggcctaccgtgtgtaacacgtactggcagggcaagttatagcccgacgtgatcttcgccgagccggtaggttcctcgtgcccctgcgcgcgcatcagctccgcgcatttaaggcgcagggcgacccctcttttggtgtggatgatgttgtcgatacagctgtgcagaggaacaaaacagcctaataggccgctgttcgccgcgttgacgataccgtctaccttcagccgggtaatatctccttgccaaaggacgatgcgcgtaccgcgaggggtaggcggcagctgcgctgcatccacaatcccctgggagacgatttcctcttggagataagcgtcctgcaaggccataaactccggggaagcgggacgaggtggacgcaggttcatcagcgcccggaagagctgctttttttcggtaataccctccaatgctgccggaagtcgtcccccgcactcggccaataggtacgccaacaattcatccagccgctgttcctgcgtcatttctcaatcgcctcctcttttataacagccccggcagggcaaagcgtatagcaatttccacagtgcagacaatgcgcctgcataatcgtagcactgcccccggataaatcgatgcaaccctgcggacaggcagccaggcatctgccgcaaccggtgcatcggtgggtaatgtgatagccctgtgcaagaagttgcgcaccgccaaaggtaaaagaacggcgcagaaccggctgggcggacaggtcgaaccactcgccgcagccccgatagatctgaaaagctgcaagcgcacgctgagcggctttggtgggatagatctgtgccatgtagggatttttctccagcaggcgctgcaaacgtccttcatctgccgggcggacttccccttgcagggagagggccgcgcttcgcagcgtatcggcccccttgaccccggtcaacgcgactttatcgcagcgcatcaaacgggaatataaacttttgcccttggcagtcagaaagtacacgcccgcctcatcccagtccatcatatcaaccgcgcaggtacaaggcaagccccgctcgtccagggtcgccaggacggtggtgtggatctgttcgaccagataggcaaagtaatcgttaaccgtcatcatacataccgctccaggcagacctcaagcaaagaagaacccggccgtcatctccagatagttatcgccgctatactggggataggctgtgcggacggcctgcttaaaggcggaggcatccttgctttgcgcggcgagggctttcacttgctccagatagtcgatcttcgcttgcgcatcctttaagtcctcgggcgtgtaatgggaggtaagaatcagactgtaccccttttgcagatacatcttcagctgtgcgatgatcgcatccgcgtggctggaacctgccacaatcgagtggcagtcgtgccccatcatatgggtatagatagcgttgatctcgggaatctcgatatcgaaagcatctggcgtggtggtgatgataaaatcgattccgccgatggtgaccgggccctccgtcaaatggtgggtgatcgaatggatgccgctgtcaaaacaatcgccaaaggcggtttgaaattgatcgatcagcgcccgcccgccgccgcggtggccgtattcctccgcatttggtgtggcgtatttttttacctccggtaaaaaggccgccccagccatgtgataggccagttacattccctctaccagcaggttttggcactgcagataatcggtcagctcgcgctcgttatccgtaaagcaaggggcctcgatcagcacggcgcggcccgctttttctaaaatgaagacttcatcctccaatggatcgtgggtctgataggcgtgcaggcggatggcgccaaaatcgtaaatgtgcatctcgcccttttgcagcgcaactttttggtaggtgtttttgttcatcatatgttcctcccgaatatggtgttagagcgttggggggatagccgcttgacttcccgcaacctctggccctataataaagccgtaagaaacgaatgtaaagtaagcactttattgtgctgtagttactaaaaagatactattgtacgattcagccatgtgagagcggaggaggaagtgtaatggaacaggtgttgccggcctgcccggtggaaacgacgttgatgttgatcggggacaagtggaaggttttgatcctgcgggagctggtcggcggtaccaagcgctttggacagctgaaaaaggccatcggcggggtcagccaaaaggtactgaccgcccagctgcgggatatggagcaaaaggggcttttgagccgcaaggtctatgccgaggtgccgccgcgggtggagtataccctgacggaaaccggctatagcctgcgcccgattttagatgcgatgtctgcctggggcagtgcctataaagcgaagaatgcgcaggcggctgggcaaatagaaggctaggcgcaaagcatggaaaaaaacagccctatggcaattttgccgcagggctgttttgttatacttacttgtggctttgcggtactttgatccaacctttctccaaccaatgtcggttatcggcggaaagcggccgctcatttttggcgatcgtctggtgcatcaagcgcgtaatggcgaatttgcattggacaaccagccccatgcgcgcgggacgaaaagaacgataaccgacggctagcctttgtgcccggcggacgatcttatcccgccggcgggcagaaagctcctgccagatcacgccctccatcagcccgacgcccagctttttgatgtgggacacgcccagccaggaaaggctggtggccatatccttttgcgcgccgccgttgaatacgccaatggcgttggtcaggatcacggcgcgcttggtaaacatctgctcctggggccggtgcaccatccagtgtacgcacaggtgatccagcaacgccttcatctggcccgaggtccgcagggcgtagacggggcttgttaggatcagcagatcggcttccagcatcgcctcccaaataggctgtacgtattgggcgtgcgggcagcgtatttcgctttggaaaaagcaggttttgcagcccgtgcaaaagtggggcatatcccggggcagggtaaactcccgcaaggtattgccttggcgcagcacatctaaaaatgcctctttaatgtggtaggtgcaccctttgacctgggtgccgttgatcaccgtgatcttcaatatgacgcccccctttttaagccgcagatcgacactactcctccgcgacgatgatggtgtgcccgttttcgccaaagcagttgacgatgctctggggcggcttcgcatccgtgaccagcgtgccgatggcctgcagcggcgcataggtcatcagcgacgcggtatcgaatttggtgtgatccaccaaaaggatgctgttggggcatgtggacatgacgtgctgcttgatatcgaactccgcgggggaggagtgggtcactccgctgggcaccgagatgccggcggaggccataaaggccttgtttacgttataacgcgataggatctgtagggcgctggtgccggtaaaggagagggtctcccggttgagggtgcccgatagcgagatcacattcaggttttcgcaggggatcgcctcgacgatcgcctgcaggttgttggtcaaaacggttacgttccgcacatctttaaggcactcgaccatatagaccgtcgtggtgccggaatccagaaagatcacatccccatcggcaaccaggcgggaggcgcgccgggcaatgcgcttttttaggcgcaggttctcgatattgcgctgggaaaaggagactagcgtgcgcttgggctgcaccatgactccgccataggtctttttaaagcggccggttccggtcagctcctccacgtcccggcggatggtatttttcgatacgccgaatttttcgcaaagttgatcaagggatacggtattgtgctcgtaaatatagttttgaattgcctcgatccgcttggtacgcatagcagcaatcccccttgctattgttagatgttgatcatattccggttgggttgataggcatattataagtaaaattagggacaaaatcaaactttatttaataaaacgcccaggatattgaaaaactaagggcctgttgctatgatatagaacggagtttaccagaatgtgatcaaaatggatggggaaaggaagtcaatgaagaatgtctcacgtgtttttgacgccacataagatcgtcagcggacgggatgctttgaacgatgcttccggtgcgctggccaaaatgggccgcaaggctttagttgtaacggatgggatgatggaaaagctgggcaacgtggataaggtgtgccaggtgttggagggcgcaggggtggcctacagcgtatttgcccaggtaaactgcgaacccaccgaccaggtggtggacgcgggccttgcccagtaccgtgaggcggggtgcgattttctggtcgccatcggcgggggaagccccatcgacactatgaaggcgatcgccatgctggccgtatgcggaggcagggtggcggattatatgggcaaggtggtggaggaaaagctgcccgccatggccgcgatccctaccactgcgggaacgggctcggaagcgacgcagtttaccattattaccgatacggccacggaggtcaaaatgctgctcaagggccccagcttgctgccggagctggcgattatcgacccgcagtttaccctcaccgcgccgccggccatcacggctgccacgggcgtggatgcctttacccacgctattgaggcctacacctcccgcaaggcgcagcccattagcgatactttcgccctttcggcggtcaagcgcattttcgcaaatctcaaacaggcttatgaccatggggacgacgtggaggcacgcatccaaatgtccgtagcctcactggaggccggcatcgcctttaataattcgtcggtgactatcgtccacgggatgagccgccccattggtgcgctgttccatgtgccccatgggctttccaacgccatgctgctggaagagtgcctgcgggatgtggcctgcggcgcggtagagcgctttgcagacctggcgcgccagtgccgcctggcgggcagcaagacgccggacgaggaagccaaggacgcgtttatcgcaggtgttgcccagctgcttcaatccatcgatattcctacgctggcgcagtatggcatagaccgggacgcttactttgccagcatcgacaagatggcgcaggacgcctttgacagcggcagcccgtccaatacccgcaaggagatggacgtgcccgcgatcaaggcgctttatgagcggatgtggaaataaggaagcctgaatatttggtaacaaaagccccgctgccggtttttcggcggcggggttttgtctatacacgcctttacttggcggggtagtgcgccaaaaagaaatctttgaacaattccgtgatgtattcgtaatggttggaacccgcgtagatcttactggtcgcggacgaaacgccgtatccgtccaaccggctcatcaaatgagcaatgccctccagcgtggaatcgttctccccataaaattcagcgtagtcggcatcctcgttttcgccgccgcagatatagagggttttctcaaaagaaccatttcgttcaaaatagccgtattccgtcaggtatgcgggcgggtcgctttggctgggcaaaaagtagggcgaccagaaggcggggctgccgatgatgtagtgctggaagggctgattgtcaaaacggtccgcattgaaggcggcatagtgggtaaatacgccgcccagcgaatgtccatacagcccggaacgggcaaaatcaatggcgtaatgctcgtccaaatagggcgccaggttatcggtgataaaggcgagaaacagcgccttatcctggcagtaaaaacgtccccgcacggcgttgtccgtcccatccagcgcataatcatagccgatactcacgaggatgacgtcctctaccttgccagattgcatcatctcccaaagcgcaggatgatcaccaaagcgccatacgccgtcggtcatcacaaacatcggataggtgttcgccgcgtcataatcgggcggcagggtgacgtgaatgatgaaatcgctgtccagttcctcgtcgtacaggcgcagctcctgcacgctgcccttgattttttccacctgtgccgcatcacattcccatccccagataaaaatgtcctcgctgctggcattatccctctccagcagagtgagcgatccgaaggaagaacggcttttttcggccgttgtcatacggttttccagctgaccggcgcgctgcgtagaggatgaagcggggggtggttgcacagaatccaaatcggaatcaggcggagcagtcccttgacaggcgaaaaggctgacgaataagaatagagacatgattaatacgagcgattttttgactatttgcatatttaacacctcttatttatcgaaatgtgtgtgtaatatgtataatggtcactaaaatgtgttgctgcaaatttatcataaatgacctaaaagtaaatagaaatagccgatggtatacattgatgatgtgcgggaacggagagagccgcgcacgcaaaatgtgctcgtgcacgcgaaaaaataaaaataatccaagttttaatggggagaaaagagtgagaggcgaaaatttcgctaaattccgtaaattatgattgaatatgggtcaaaacgatgctaatatatactcaacagttaaccatattattttgttagggggcatttgagatggtcaaagttggcatcatcggcgcggggcgcatcggcaaagttcacttgcagagcatctgcaactacgtgcgtaacgccgccgtcaaaaccgtggccgacccgtacatgaacgaggaaacggaagggttcatccgctctttcggggtggagaacgtgacaaaggattaccatgagatcttgaacgacccggagatcgacgcggtgctggtctgctcttctaccgatacgcacgcgcccatttctatcgaggcgattgccgccggtaagcacgtattctgtgaaaagccggtggatcacgacatcgagaagatcaagcaggtcatggaggcgctggaaggcaaaaaaatcaaattccaggtgggctttaaccgccggtttgatcacaactttgaagccattcgcgctgcggtaaaggagggaaggatcggccaaccgcacatcatcaagatcacttcgcgcgatccggaacccccctcggccgattatgtagcccattccggcggcatgtttttggatatgaccattcacgattttgatatggcccgctacctggtgggcagcgatgtggaggaggtctacgtgcaatccgccgtgctggtggacccggctatcggcgaggcaggggatgtggataccgccatcatcacccttaaaatggcaaacggcgcgctgtgcgtgatcgataactcccgccgcgcggcctatggttatgaccagcgggccgaagttttcggcagcgagggaatgatcgccaccgctaacgacgccaattctaccgcggtgatctccaacgcccagggggtaacaggggaaaagccgctctacttctttctggagcgctatatgcagtcctttgctaaagagatggcctgctttatcgacgcggtggagcaggacgcagagacgccggtggacgtgatagacggcctgcaggcggtgcgcattggcgttgcggccaaaaaatcggtggatgaaaagcggccggtggccttgagcgagatcgactaaggaaggagctgggggcgaaatgaactacatacaatttgacagagagcggccgctggatctgatcctgctggggcgggtggccatcgactttaatccgctggactattttaaaacgctggcccagagcgagaccttcaaaaaatacgtgggcggctcgccggctaatattgccgtgggcctttcccggttgggtaaaaagtgcggcttttttgcccgggtatccgacgaccgctttggcgattacgtgacggagtattttgacaacgagggcatcgataccagccgcatccgccgctgcgaaaacggggaaaagctgggcttgacctttaccgagatcttgagcgaaaatgaaagcagcatcttaatgtaccgcaacgatattgcggacctgcagctggatgtgcaggatatcgacgaggcgtacatcaaacagggcaaggcgctgctcatcagcggcacggctcttgcggccagcccctcccgcgaagcggcgctaaaggctgtggctatcgccaagcggacggaaacgccggtgttttttgatatcgattaccggccctataactggaagaacagcgatgagatcgccatttactattccatggtggccgcgcacagcgatgtgatcctgggctcgcgggaggagtacgacctgaccgaggccttgatcgaacctggccgtaccgatgcgcagactgccgcctactggcaggggcgcggggccaagatcgtggtgatcaaacacggcaagcagggctccaccgcctatacctgcgatggcaacagttattcgatcaagcccttcccggtcaaagcgctgaaatccttcggtggcggggacgggtatgcctcggccttcctgtacggcctgtttgagggctgggagatgatggactgcctggaattgggcagcgcctcggcctcgctgctggtggccagccacggctgcagcgcggatatgcccagtgtggagaaggtgcgggcgtttatcgcgcaatgtaaaaaagagtacggcgaaatggtcgccagaagctagaaaaagtaagggggaaacgcgatggaaaccacaaggatgacgatggcgcaggcgctggtcaaatttttggataaccagtacgtatccatggacggggtggagaccaaattcgtccatgggattttcacggtctttggccacggcatcgtctgcggcctgggccaggcactggatgaggacagcggggccttaaaggtctaccagggccgcaacgagcagggcatggcccacgtggccacggcctttgccaagcaaaaagacaggctgcagatcatcccctgcgcctcgtccatcggcccgggcgcggccaatatggtcaccgccgcggctacggccagcgttaacaacattccgctgctgctgctgccgggggacgcctttgcctgccgccagcccgacccggtgctccaacaggtggagcaggagagcagcctgaccatcaccaccaacgatgcatttaaacccgtatgcaagtattgggaccgggtggtgcgccccgagcagctgatgacggctatgatcaacgccatgcgcgtgctgaccgacccggcccagaccggcgcggtatgcatcgccctgccccaggatgtggagggcgagagctttgattaccccgattacttcttccaaaagcgggtgcaccgcatcacccggcctgtgcccgtgcctgaggagatggaggatgtggcggaggcgattgcaaaagcccaaaaaccgctggtgatctgcgggggcggcgtgcgctattccaaggctggcgcggcgctggaagccttctgccaggcgtttaacatcccctttgccgagacccaagcgggcaagagcgcctgccgttccagctcgccctacaacttgggcggcttgggcgctaccgggaacctggcggccaataccatcgccgagcaggcggacctggtcattgccgtgggcagccgcttgagcgattttaccaccgcctccaagtcgctgtttaaaaacccggatgtgaaatttgtgtccatcaatatttcccgcttccacgcctacaaggcggacgccgtcaaagccgtgggggacgcgaaggccacgctggaagcgctgacggaaaaactctccgcagcgagctaccgttcgggctatggggaggagatcgcccaggccaaggctgcgtgggagaaggagatggcgtttttagcgggctaccgctatgacgagaaatttgagcccttgattgccgcgcgcaaccccgccaccatcgaggagtttgtggcgctgaccggcggcgaggtcacccaggtctccgcgctggcgctgatacgggaaatgctttgcgacagcgacatcgttgtaggggcctcgggcagcctgccgggggacttgcagcgcatgtggaccaccgatacgcgggatgcttaccacatggaatacggctactcctgcatgggctatgaaatagccggcgccctgggcgcaaagctggcccagccggaacgggaagtctatgccatggtgggggacggcagttacatgatgctgcacagcgagctgtttaccgccctgcaggagcgcaagaagatcaacatcctgctctttgataactgtggctttggctgcatcaacaatctgcagatgtcaaacggcatcggcaacctggctaccgagttccgctaccgggacaacgcggacagcctacgccacgatggggcgctgatccccgtggactttgccaaggcgggggagggctatggccttaagacttacacggcccgcaacctgaaggaactcaaagacgcgctggaggatgcgagaaagcaggaggtctccacgctgatcgacatcaagaccctgcccaagaccatgacggacgggtatcgctcctggtggcacgttggcatcgccagcacctcccaaaaagagggcgtgcaaagggcctatgcggagaaggaagccgcccgcaagcaggcgcggatgtattaagagggggaaaagagatgtttgatccgaataaagtgaaactgggcatcgcgcccatcgcctggaccaacgacgatatgccagacctgggcagcgagaataccttccagcagtgcgtcagcgagatggcgctggccggatttacgggctcagaaatcggcaataaataccccaaggatgaggcggaactcaaaaaggcgctggcgctgcggaatgttcagatctgcaacgcctggttctcggcctttttgaccacgcagccctacgaggagacggagcaggcctttatggagcacatccgctttttaaaggccatgggcgccgcggtggtgggggtgtccgagcaggggcacagcatccagggacagatggaaacgccgatttttgagcaaaagtacgtgttaaacgatgcgcagtgggataagctgtgccagggactcaatcagctgggcgccaaagccaaagagatcggcatgacgctgaccttccaccaccacatgggcaccgtggtgcagacggccgaggagatcgaccggatgatggacaataccgacccggagctggtcaacctgttgtttgatacgggacatctggcctactgcggggtggacccgcttgccatcgcccgaaaatatggcaagcgcatcaaacacgtacacttgaaggatattcgccctgaagtggtgcgggaggtcaaagagaatcacctaagtttcctgcagggcgtgcgcaagggcgcctttaccgtgccgggagatgggtgcatcgactttgaaccgatttttgaggcgctgaaagattgcgattatcagggctggatggtggtggaggccgagcaggatccggccattgccaacccgctggaatacgccatcaaggcccggggctatatccgagaaaagaccggcctgtaagggaggaaagaaaaatgaacggcaacgaagtttttggctatccgcagtatgacaaaaatggggtgcgcgtgatcacccgcaccaccggcgcgtacagccacgcgatgatgaacatcacatcctactggatgaaggcgggggatactcgcagcttttgcttcccggatgaggagatggccgtgctgctggtgagcggcagcgtggagatcgcctgggagggcaaaaaggagaccgccagccgcaaaagctggtatgaggaggacttaagctgcctgcacgtgtgcaaggatacggcggtactggtcaaggcgcttagcgacagcgaagtgctggtgcagaccacggaaaacgaccgcgcgtttgacagcaagttttaccgcattgaggattgtatggtcaacatgtccggcgtaggcctgtgcggagagaccaatatccgcagggtggtcacggtgttcgactatcataccgcgccctactccaacatggtgctgggcgaggtgatgagcaaccagggcaactggtcggcctacatcccgcaccatcatccccagccggaggtttactattaccactttgaccatccccagggctttggcgcctgctttatcggcgacgacgtgtttaagatcaaggatggcagcttttccgccattcccgggggcaaaacccatccgcaggtcaccgcgcccgggtacaagatgtacacctgctggatgatccgccactttgacggcaatccttggacggatcggatcgacgacgaggcccatacctggctgtacgatgcgaaattctgattcaaagcaatataaaaaaggccgcgcttttcagacgcggtcttttttactttccggagcggccatagcagccttttgccgctttggccaggtgagcagcacggccatcagcaggatcagaccaaaccccagccagtctaacggagcgatgggggtcttgagccatagtgtcatcgtcagcgccgcgctgaccggttcgatacaggctagaaggctggcacgtacagcgccgatatcgctgacgccctgcaggtaaagggtaaaagagcccgccgtgcccagcagcacgatggcggcgatgcctaaaagcgccccgccgtccagttggaccgaataggtccacacctgcgtcagcacggccagcacgctgccgcctatcagcatggcaaaaccggtcatggggacgctgccataacgcgccaccaggtcgccgggcagcagggtgtagagcatcagggccacggctgccgccagcccccaaaagagcgcctgcggggagagcaccaattgatggagactgccatgggtggccagcaaaaagatgccgatgattgccagtaccagggcgacgttttctttatatgtcggtaaccgccggagacgaacgcagctgaccagcaagatcagcgccaaccccagatactgcagcgccgttgcggtggccgaattggcgtgggcgatcgccgtgagataggtatattgacaggtcatcagccctaaaatggaaaacaccgccaaacgtgccacatccctgggcacgcgccagaccgcttttaaagcggagggatttttgatggcggcaaaggttactagcagcacgcctgccgatagcatgcgcaccgaagagagccattggctgtcgatggatttaaaggtgaataaatactgccctacggttcctgagaagccccagaggatgccgcccagcagcgcgcagagcatgccgcgcagggttttgttgtgaagagtacttttcatacttttgaatatagcatattcaccggctgccctcaaggtataattcataaaatggcagatatgggggataacaggacgatttggatattgaagttaaattcacaggcccttcctctaaagagaggattgctcctcacttggcgctggttctgatttccgcttttccaccgggaaagccacctcctaaaacaaaaaataggtggtcctgattgccacctattttcgtctaaaagcattgactttccaccattcaaagaacccgcaaacccgcattgctacgggcttttctcactcccactcgatcgtgcccgggggcttagaggtgatgtcatacaccacgcggttgacatgggagacctcgttgatgatgcggttggagatcctgcgcatcacggggtagggaatttcggcaaactccacggtcatggcgtcggaggaggtcacggcacgcacgccgatgatgtaatcgtaggtgcgtccatcgcccatcacgcccacggtgcgcatgccggtaaatacggtaaagtattgccaaatctcccgatccagccccgccagggcgatctcttcgcgcaaaatcgcatcgctgtggcgcaggatgtccagcttttcctgcgtaatatcgccaaggatgcggatcgcaagccctggccctgggaagggctgacgccagaccgctttttcatcgatccccagctccaaccccagcgcgcgcacctcatctttaaacaggctgcgcagcggctcgataacggtgcggaacttgatgtccttgggcagcccgcctacattgtggtgggacttgatgacctgggcgttgcctacgccgctttccaccacatccggatagatcgtgccctggaccaaaaaatcagagtcgccgatcttggcggcttcctcttcaaatacgcggatgaactcctcgccgatgatcttacgcttgcgctccggctcggtgacgccagccaacttgctcaaaaaccggtcttttgcatccacatagaccacgttcagtcccatctcatcacgaaagacgcgcagcacctcttcggcttcattcagccgcagcaggccatggtccacaaatacgcaggtgagctgatcgcccacggcgcggtgcaccagggtagaggccacggcggaatccacgccgccggaaaggccgctgatcactcggcccttgcctacggttttgcggatgtcggcgatcatgctttccacaaggccggagaccacccaatcgccggagcagccgcagatatcgtacagataatttttgagcatatcctgcccaaagggtgtgtgccgcacctcggggtggaactgcacggcatagagcttcttttccggacaggccatggcgcccacgggacagtgcgccgtatgggcggtagcgtggaacccctccggcagctgaccgatgcggtcgttatggctcatccagcaggtggcctgggcttccaaaccgttaaagagcgggtcgcctgcttccagtgtaatggcgaccccgccgtactcgccgctttccgcatgggcgacctgaccgcccaatagttgggccataagttgggcgccatagcaaatgcccagcaccggtttgcccaaggccagcacgccaacgtcacagcggggcgcgccggcctcatacacgctggccgggccgccggccaggatatagcctttgacgtccgccccctccagctgggccagaggcgtgctatagggcaggatctcacaatagacctgcgcctcgcgcacacggcgggcgatcagctgggtatactggccaccaaagtcgattaaaataatgcgttccatatacagccccctttatcggtcttcccggttgagcgatgcgcctacaaaatcccgaaagaggggatgggggcgattgggccgggataaaaattcgggatggaattgcgcagctacaaaccagggatgcgccggaagctccacgatctccaccaggttccggccgggattgacacctgagatgcgcatgccgcccgcctcgaactgatcccgataatcattgttaaattcatagcggtggcggtggcgctcacggatatcatcctgcccgtaggcggcgcgggccttggtacccgcgataaggtgacaatcgtacccgcccaggcgcatggtgccgcccagctgggtcacatccgcctgctcgggcatcagatcgatcaccgggtagggcgtttccggatcggcctcagagctgtgggcgcccgtcagccccagcacattgcgggcaaactcgatcaccgccatctgcatccccaggcagatacccaggaaagggacgcctttctcgcgggcgtactggatggccagaattttgccctccagcccacggttgccaaacccgccgggtaccaggatgccatcggcgtctttcagggtttcggccacgttctcgggggtgatattttcggattggatccactgaatttccagcttggcctgatggtaggcgctggcgtgggtcagggattctttaatggaaaggtacgcgtcgtgcagctctacatacttgcccaccagcgcgatggtcaccgtgcgcttggggtttttgatgtgcgcgacgatctcccgccaggcggcaaggtcgggcggcggggtctgaaggccgaagtgctggcaaaccaacccatccagattctgctcggccagcagcaggggcacctcataaatcgtggaagcgtccaggctgtccaccacatgattcaccggcacattacaaaaaagcgagatcttgcgccgctgatcgtccggaatcgggaaactggagcggcagaccaagatctcgggctggatgcccatgctcatgagctggcgcacgctgtgctgggtgggtttagtcttgagctcatcggacatggggagatagggtaaaagcgttaaatggatgtagaggcagttctcccggcctacatcccactggaactggcggatggcctcctgataggggacggattcgatatcgccgatggtgccgccgatctccaccagctgtacatcaacctggcttttgcggctggcgtccagcacgctatttttgatctcgtccgtcacatgcggcagcacctggatggtctgccccataaattcgcccttgcgctcgtgctcaaagagggcctggtaaatgcgcccggtggtcacgctgtgtgcgcgggtgagggggacgtcggcaaagcgctcgtagtgacccaggtctaggtcggtctcagcgccgtcgtcggtaacgtagacctcgccatgttggtagggattcatggttccagggtcggtattcaggtaagggtccagtttcatgatcgacaccttgagcccccggcagcgcaaaagccgcgctaacgaggcagccaatagccccttccccagcgatgaggtcacaccgcctgtaacaaagataaatttagttgccatccatccacccgctttcttctcatctagcaatccattctcaagtacacttttttgacattcgcatgcaaaataacaaactttatattagcgaaatcggggatttcctgtcaagggaatatggcccgcatagcgtaaaaaattgtgccgttctacatttttttgtatttgccggtcagatcggttgtaaccgtgaacgtgtgttgctataattaataatgtaaccatttcatttttaaacattctttacgaagaaacgtttggagcaaaactgaatagggggaagattatggagatcattgcaatcaagggcagcccgcgcaaaaacggcgatagcaataagctgatcgatgagatcatccgcggcgccgaggctgccggacacacctgtacgacttattttttacaggatatgaacctgaaaggctgccaggcctgttatgcctgtaagcaagagggcccgggacgggattgtattatccgcgacgacctgcagccttactgggcccaactgcataaggcggacgcactgattttgggcgcgccgatctacgccagcggcgtttgcgggccgatggtcagctacatgaaccggcactattgcctgttggataaggattggaacgtccgggtaaagccgggcatcaaggtgattggcgtattttcccagggccgtacggaggcagaggagtatcaagaggtaataaactggttcctgagcgattttgagcgccgcaacatggtgctaaaagacgttatcgtcaaaaccgggcgcgagccggtggaaaacgacgcggaactgatgcggcgcgcttatgaagacggcacgcggttggcggattaaaaagcattgcaccaaagcgccgggggaaactccggcgcttttgctttaacgattagcttatgcagaaaagtggtattttataccgctgctttgctacttagacagttttcgcaaaggaggaatggtaagctcagggcaggttattgactttggggggagaggttacaactatgggaatgcaggcgcgggcaaagaaaatgcggatccgctcgtttgtgatgagcagaaatctggagatgataggctggggcgcagcagggctgctgatggcccgggtacagatgtttggcgcttatgcgccgctgggcgttgcgggcgttggggcctccctgctatccgggggaaacgcgctcagccttctgatcggcgcaatcgtcggccggctgaccataggcgttgcggacggcagggccttgcaggatatcgcggccatggcgctggtctacctgggatgggcgctgatccaaaagaccaagatcaaacaaacgccctggctgatggtggggatctgcgtggtggccagcgcgggcgcccaggcggcgcggggttcgaatgtgctgtacgattggctgatgtgggtggccagcgccggggttacagcggtgatggtgccggtctttgctgtggcgctagagcggatacgcgaggcgggcagccgcaggctgctgacgggggaggaatggacctgcatggccctgttggctgccgcggtggtcatgggcggcatggggtttgccatcggtccctttcggccggcgcagatactggcctttttgttggtcatgggtacgggctatatcgccggttccggcgcgggcggggctaccggcatcgtcatcgggctcgccatggcgctggtacgcggggataacatccagccatttatcatgggcaacttaggcctatgcggcatgatctgcggggcgctgcggcgcctgggccgcccgggggtggcgctgggctttattctggccaacgccatcgctacgctggtggtgaatggatcggttaccgtcatcctgccgctggtggatagcctgacggccggcgtgatctttatgctcgtccccaaaaaggtctttggcaagatcatggaactttccaaggcgaccacgcctgagaccgacgcttacctggagcgggtgcggggctatgctgtagaacagctggaccagaacgcgctgatgctcgcccacatggccgacgcctttttgggcctgcccgacagcgggaacccagccgagggcgaggtgaccgcgctgatgcagcaggtcgcccgcaggacctgtaacgactgcgcgctgcgcgcagcctgctggaagcgggattataataagacctacgccatgttttacgacctgatggtgcgcaacaaggcggaacggctgaaaaagagcgacctgcccgagatgacggcccggcgctgcatgcgcttggatgcgctgctgcgcgacatgactcaggcgcttcagggctatcaggagcgcaagagctggcaaagccgggtggacgatagccgccgcgtgctaggggagcagttggaaggcgtatcccaacggcttgcggagctgacagaggaactgcaggtgcccatcacctatgacgcggctaccgagcaggcgatattggaagagatggaccggtgcggcatcgaggtgaaacaggtctccgcctgccagatagacgagcgatgggaggtcaatatcgcctttgccgcctgcggcggtaaaggcagctgtatcggcaaggtggcccggggccttagcaatgtgctacaaagccccatgcgctgcgctacccagggctgcaacggacacgagcaggggatctgccgcaagcgctttatcgaggcggaagggatggcggtgcagaccggggcggccagcctgccccagtccggtcaggaggtctgtggagacagctacgcttttcaacagctggcggacggcaactacctgatgaccctgtctgacggcatgggcagcggggagcgcgccgcccaggagagcagcgcggcggtgacgctggttaaagagatgcagcgggccgggatgtcgcaagagctgatcctgcgcacggtcaaccggctgcttttgatgcgctcgggcggggaccggttcgcaacggtggactggtgtaccatagaccttgcggctggcgaggcggagatgatcaaggtcagcgcggcccccacctttattttacggggcgatacggtggaaaagatctcctgcggggcgctgcccttagggatgctggaggaggtgcagccgggatatatccgcaaaaagctggagccgggcgacatggtcatcatgatgagcgacggggtggtagacggcatcggcgaggagaatatgaagaggctgttggcggcgctgctatataatctggaagggacacccaaacagatggcggagatggtgattcacgaggtgctgcgccaatccggcgggcaggcagccgacgatatgacggtgctgatcggcagggtatacgagccgatggcatcataacccgggaaaaagagcagtacaggcacaaacgggcggtaatttaccgcccgtttgtgtattttttgttaattcatgcgtttcaaagctggggatgcttgaaagaaggcattaaaaccgatacaataggaatatcactccagatggggaaaccttaagatgtctagcgtattttatgccgtccgcaatgccatgctggcagcgggggtatcgcgattatccactgtggtttgcggcgtatccggcgggccggattcgatggcgcttttagatgccctgttgcagttgaaagaggaacagggcttttctttgtgcgcagcacattttgagcacgggctgcgcggcgaggccagccgggcagacgcagcctttgtcgccgctttttgcgcggcgcggggcatcccctgccagatggcctcgggcgatgtggcggcctttgccagggaaaagggctgctctaccgaggcggcggcccgccagatgcggtatgctttttttgaggactgcatgcggacgcgcaacgccggttttctggctttggggcatcatgccggcgaccaggcagaaacgatgctgatgcggctgttgcggggcggcggcgcaggggcgctgggtggcatggcgccggtgcggcgtagcggcccggggcttcccgaagagaaaggctgcgcgctggtgcggccgttgctggaatgtacgcgccaggatattctggattattgcggccagcgtagtttggcctatcgcagggatgagagcaacgccagcgacgatgtactgcgtaaccgtatacgcaaccagctgatgcccgtgctgcaaacctataacccgcagctggaacgggcgctgggcaggcaggccagcatattgcaagcggaatcggactatctcgagcgggcggtaggggctttgctgcaaaaggcctacgccccgcaatacagcgcctggctggcacggcccctggccggcgcgcatctggcgctatgccgcagggcaatctaccgcttggggcagcaggcaggcgcacaaatggattttgaccatgtggaaaggctgatgcaggcgctaaagggcgaaagcggaacgtttaccctgccggggaatgtgatagcccaggtctcctgcgggtatctgctctttgcggcagcggggcatgaaaaggctgtattgcgcgcgcctatcgcccgaacgggcgcgggaagcgtccagttggagggtggcggtgtgatgcgctggcactacctggagcaattgcctggagattggcgggcgcaggccccggacaggatatatttggatgcccaggctctttcaggggaggtgtacatacgcacgcgcaggccgggcgaccggttccacatgttgggcgggccgggcccgcagcggctaaaggatgtgctgatccattggaaggtgccgcagttgcggcgggatgcgctgccacttttggtctgcgataggggcattgccgcggtagcggggcacatgccggcccattgggccaggattacttcgggcagccgcagttacctatgcttggaaataacagatgaatgataaaaaattacgataaacggtcaataatagggcggagggttcaacaatggttaaaggcaaggtggagcagattctcatcaccaaagacgagatcgccacgcgcgtggcggagctgggacgcagaattaccgaagattaccgcggacgcgatctgctgatcgtgggcattctaaaaggtgccgtcgtgttttattcagatctgtgccggagcatcgatctgccggtgaaaatggacttcatgtcggtctccagctacggggcgggtacggtttcttcggggatcgtcaagatcaataaggatctggaccactcctgcgaaggggtggacgttttgatcgtagaggacattatcgacagcggactgactttgcagtacctgaaggaatacctgatcagccggcaggtccgctcgctgaaggtctgctgcctgctggataagcccgagcggcgcaagtgcgacctggtgccagactattgcggattccaaattccggacgcctttgtggtgggatatgggctggattatgcggagtactttagaaaccttcccgatatcgggatattaaacccggatgcataggcagaatgcttgcgcgaatccctagattatgctaaaattctttggataaagcctagcgaaagcgtataaggttatatagattgttaaagtagggcttcggccctggtgaggaggcaagggattgaaaaaaattatccgtggaccaggattttttgtcctgctgattttggttatcgtactgatgtctacgctgtttggtagcttcagtttcaatacgcagacggatgaactcaactacaataccgaatttctagagctggtcaaggaggataagattgccaaggtagccatcgtggataacacgctggtgggcctttataaggaatcgaagattcgtgaggccgatttccccaatagctatgactttaagaccatgatccccaatcgggatttgttcttcgagcatgtatccgctattaagggcggggacgccaatgatccttccgcagtagggttcaccatcgatattttacccacgccggaaccttcgatctggtccatgctgctgccgtatatcgtgatggcggcgctatttgggctactgtggttctttatcatgcgccagcaaaatgcgggcggcaacagcgccatgagctttggcaaaagccgggccaggctgcaaacgcccgaggataaaaaacgggtcaccttccaagatgttgcgggggaggaagaggagaaagaggaactggtagagatcgttgaattcctcaagaaccccaaaatctttatggaactgggggcgcgcatccccaagggcgtgttgctggtgggccctccgggcacgggtaaaacgctgttggccaaggccgttgccggggaggcgggcgtgccgtttttctccatcagcggttccgactttgtggagatgtttgtgggcgtgggcgcctcgcgcgtgcgcgacctttttaacgaggctaagaagaatctgccctgtatcgtatttatcgatgagatcgacgcggtgggccgccagcgcggcgccggactgggcggcggacatgatgaacgcgagcagacgctcaaccagctgctcgttgagatggatggctttgcggtgaacgagggcattattatcctggcggccaccaaccgcgcggatattctggacccggcgctgttgcgccccggccgtttcgaccggcagatctatgtgaactatccggacgtcaaggggcgtgaggagatcctcaaggtgcatatgcgcggcaagcccctggccagcgatgtggatctgcccaccctggcgcggctgaccccttattttaccggcgcggatctggagaacgtgcttaacgaggcggccatcctggcggcgcggcggcataaaaaagagatcggcatggatgaagtgaaagaggcaatcagccgggtatccatggggccggaaaaacgcagccgcgtggtcatccccaaggacaaaaagctggtggcctatcatgaagcgggtcacgccgtagtggcccgggccctgcccaactgcgacccggtgcacgaggtttccatcatcccccgcggcatggcgggcggctatacccagaccttgccggatgaggataccagctatatcagcaagggtaagctgctggacctgatcgccatggcgatgggcggcaacgcggcggagaagctaatcttcgacgatgtatccaccggcgccaccagcgacctgcagcacgctaccgatattgcccgcaagatggtgactgaatacggcatgagtgatgccatcggcccggtatatttaagcgacagtgggcacgaggttttcctgggtcgcgacttttcgccccagcataagtatagcgaggcggtggcggctaagatcgacaaagagatgcgcgatatcctggaaaagggatacgccaaggctgaggaggtcatcaacgccaaccgtgaccgtttggagcgcatcgtcagcgcgctgatcgagcacgaaaagctggaccgggctatgtttgaggcgctgtgggtgggcgaactgctgcccagcggcgatcagcccggcgagaaagaactgggggatcaagcgcttgaagcgggcgaactgcccagcgctgaggaggacaaggcgccggatgtgaacggcggcatgcccgaggcaggtgaataagtaacagaaaataaaaagcgtggaacgcaaagttccacgcttttttatttctcatcgtattaaaaggaaaaggggttgcaggattttgcgcccttatcagtcctccagtaacggacgcaggtagtcggccccatctttcaaagactggaaagggtcgtaatcaaaatattcctgctcgacgatataccaatccacgccctgggctttagccaactgcaaaataggcgcaaagtccatggcgccctgaccgatggtgcagtcgtcctcctcgccaaaggcgtgcatatctttgatgtgcagcaggggcacacgcccggcgtatttgcgcatgaagttgagcgtgctgtacttggcgtaatcgcaccaggcggtatccagctctacctggcagacttggggaagggtattctccagtagaatatccatccccgttacaccgccaagatcggcaaattcccactggtggttgtgaaaggcaaattgcagtccgttatcacggcatttttgccccacctgggtaaagaaacgagctgcgtttttatagtcctccaccgtggcggtatcccgctggggcagcgccgggcaggcaatgtactgcccgcccaatgccttagctgcggcgatctgggcgtccagatcctcctgtagggccttaagacctacatgaaagctcatggtgcctaggttgagctcatccatataggcgcgcagggcggctgggtcttcgccaaatagcccggcgaattctacggcatcatagcccatctgtgcggttttcttcaacacgccgcgcaggtcgtccggcgtgtattcccgcagagaaaaaagttgcaaggccagtttattcatcaattgtacctcctatttgcggcatgcccaaagcctgccgatattgtatgccgcctggcgcatcagtttctgcgcgtcctccatggcggcctttaaaggcatgggaccactggccgtggaaaaaacggcagtgataccttcgtcatatagattctcgtaccccggcgccagcccgccggacagcacgacgaccggcaccccataggggcgcgcacactgagctacggcataaggcaccttgccaaaaagggtctgggcgtcggtgcgcccctcgccggtgatgaccagatcggccttggcgatggactgggccatatgggtcgcatcaatgatcagctcggcgcccggtgcgagggtagcgccgcaaaaggcaatcaaacccgcgccaaggccgcccgccgcgccggaaccggggatctcgcgtacgtcgatgccaagctcgcgcttcagcacgccggcataatgcgccaaggcccgatccagctgggcgatcatgcgctcatccgctcccttttgcggcccgtagacggcggatgctccagaggggccacacaggggattggtcacgtcacaggcgacggagatcgtagcctggcgcagttgcgggattagccccgaacaatcaattcgcgctagatcacttagcgccgcacccccgggcgggagcggacgccccttttcatccagcagtttggcgcccaacgcctgcgccatgcccgcgccgccgtcgttagtggccgaaccgccaatgccgatgatcaaatgtttggcgccgtgctccaacgcgtggcgcatcaattcccccgtccccagagtggtggcgcgcagcgggtcgcgctggtgatgggccacaagcggcagcccggaggcggctgccatctcgatcaccgcggtttccccgtcgggcagcatgccgtaaaaggcgtttacctgcgcgcccaaaggcccggtcgcctccacggagatcaactctccgccggctgcggtcaacagcgcctctacaaagccttcgccgccgtcggccatggggatcttttgcacctggcaaccgggtatcgcctcagtcagcccagcctcaatggctctggcggcctccagggcggataagctccccttaaacgaatcgggagcggcaacaatacgcataatcatccccctttaatgaattaacgaatatgagtgcattataccatgcggggactggaatggacagactgttgaatagacaagttgcctcaagcatattcttaaacgaggatgggaggggatgatccgtgaaggggaaggactggttttcaatcgcgataccgtttgcggcaggcctgctattggccgctgccggatggctgataatggacgtcaaaagtgcatggtacctggggttaaagcagcccccgtttgcgctggcgataagcccgcagctcgcctgggccggcatatactgttttttggcagcggcgggcgccctgctctgggaacggggatacgagcgatatctgctatggctggggctggacgggctgatcggtttggcccataacctggtgctttttcagctgcgcgacctggtgatcagcttgctgttgctggcactggcagcggggctggcggcctttctgatccgtaaactgtggacgcgcacggtaggcccggcgctactgctcaccctgccctttatctatatggtctatggcctggcgggtcagtactgcgtcattatgatcaattaaccgcgtcgtttgaccgggaaaaggcccggtgctatactgagggcaaacgcaaaggagtgcctattttatgggagaccacccgacctttgaaggaaaggctgcgtgttacgcggcgggccgcaagggctatgcccaagaggtatacgattttatcgccagccaggccccggcgggggagtatcccgttgcggcggatatgggcagcggcaccgggcttttcgcacaagggctgctggagcggggctacgcggttttgggcgtggaacctttagcgcagatgcgcgagagggcacaagaccgcctggacagtatggttaggtatcgcgcaataccgcaaagcgcggagaataccggccttgatagtggaagcatagactttattaccgcggcttcggccttccattggttcgattgggaccgggtccgccgggaatgggccagaatactgcggcccggcggcaaggtctttgtgatccaaaactaccgcgtttacgaggatgaattgacgaaggcgcagcacgcggcttgcgcgcgctatggcaagcattttaccagcctgaaccatggctatgaaaaggtcgcctcagggtgtgagatgttttttgcggctaaacccacgcgggtggatattgcctttgaccagatctataccgccgaacagtttattgcgcggggattgtcctcatcttatgcgccggcgccgggagaggacgggtatgagggctaccggaagggcttgcagaggatcttcgattggtttgaagaaggcgggcgggttacgatgcgtaaccgcaccgccatttggtgcggcacgctttgatggcgccgccgctgggaaatttgttttaagcgaaagccgccttgcgattaagaaaaccccccgttccgctttttggtggaacggggggtttgatgtcggtacactgcggcttaaagatcctcaaacagctccagggtctcgccggcggcgccggtaaagaagatcagcttggcgtttaagggctcgttgtttaccggctcttcagtgcggaaagccacacccttagccttgagcttttcgacgatcccgtcgatccccttaacggcgatggccacgtgctgtaccatgccggtctctttttccacctgagtaaggtcggcaggctggatcagctccagcgtcagcgtgcccaggcgcacaaaggcgatctccgtggcggtgccgttaggctgggggagagaaacgcgcttgaacatctcaaaccccaatacgtcggtataaaatgcttgtgttttggttaggtccgtcgtgcgtacgccgatgtggtgcaggccgatcatctggccctggcagcaagtgcagctcatgaaagtgacctcctaaaataatcttgctcacgcgtagtaaaaaacgcatagggatattttaacacattaaagtgatgaggggaagggcggcggcgcggtttttgccttgaaatgtagctgcaatagtgataagatgatacaaaatatgctggtatcgcaatgaaccggacatacgaagctgcaacgcacaaaaggacagtcaggtatccgcaagcggaacttgaacggaggaatgaaaagtgaaaaatcgtaatcctgctacaccgtcgcgaacgaaggtgcgcagtctggtcatcgtagggatgatggctgcgctgaccatggtgatggcgctgacgccgctgggctttttgcgcctgccgctgatctcgatcacgctgctgcacctgccgaccattatcatcacgattttggaaggaccgtggatggggatggcgacagggctgatgtttggcctggccagctggtataatgcggctacgacggcggggttactcaatgtgttctttctcaaccccgtgatctcggtgctgccgcggctgatcatcgccccggtcacctgggcggtataccgggggatgtgcaagctgtttaaaaaagggcgccaggtgctgcccatcgcggtaagcgcggtggtgggcacgctgaccaatacggtaggcgtgctggggctgctttatgtggtctacgcgcaggatatcgtcacgcgttttgccgccttggcgggggagaacgcggccgcgggcgcggcagtggcccagtatggcatgctgcaagacccctttcagggcgtggcgctgtttttgtgggcaacggtggtgaccaacgccatccctgaatgcgcggtggcggtgatcgcggccatccccgtcatcctggccgtgcgcaagctggatcggacgccaacggcgttgatgcgccgccaggcccgatagaaaagccttacgaaagaggagtatgcgatgtttttagtggtggatgtgggcaataccaatatcaaatccggcctttttgagggcaaaaagctggtggactcctggcgcattgccacccaccggaccaagacctcggatgagtacggcatcgattttatgaaccttttccatatgaaggggcagagcatgaaggatgtggacggggtgatcttttcctcggtagtgccctccatcaactataccctggagcatatgctgcgctatttcttccatgtggatccgctgatcgtaggccccggcattaaaacggggctcaacatcaagtacgaaaacgcaaaagagctgggagcagaccgtatcgtcaacgctgtggcggcgtacgagatctatggcggaccctgtattaccatcgactttggtacggcgaccacctttggcgtggtgtctgaggagggcgcctttgtgggcggggctatctgcccgggcatcaagatgtccatggaggcgttggtgcaaaacacctcccgcttgcctaagatcgagctgatccgtccggagagcgtaatcaaccgcaacaccatcagcaacatgcaggccggtatcttttacggctttgtaggcctggtggattatatcgtaggcaagatgaaagaagagatcggcgcggagaagatcccggtagtggctaccggggggatgagcaacatcatcgctgcagagtccaccacgatcgataccatcgatccggaactgacgctgcaagggctgcgtatcctctacgagcgcaaccaaaattagcggcataaaatcaggcgcgggagtgatcccgcgcttattttttacgtataaaagtgggactaaaagcggcagctaaaggcaggtgccgtcgctctaaatgtatatttcaagcgctattaataccatttcacacagatgctgttgtttgcgtgcgcgggcgcatgctataatcaagcaacgcaggcaataggggctacccccaaagcgttgcatttttttgaaggaggcggctatgcagtttattatcgaacgcctttccaagcgctttgagaaaaaagaggtgcttaaagacatttcttttacctttgacagcggcaaaatctacggcctgctgggccgcaatggcgcgggcaagaccacgcttttcaactgcgtcaaccgggatatcaaggtggatggcggtagctttctgctggatgaggcggggcaaaaacgcgaggtaaaggccgaggatattggatacgtgctctccacccccactgtgccggagtttttgaccggacgcgaatttctcaagttttttatcgagatcaacgaaaaaagcattggcgagaaccgtgagatcgacgaatattttgaaatgatgaatatcgccccggaggaccgggaccggctgctgaaggactattcccacggcatgaaaaacaaaatgcagatgttgatcaatatcatcgcccaacccaacctgcttttactagatgagccgcttacctccctggatgtggtggtggccgaggagatgaagcagctgctgcgcaaactcaagcaggggcgcatcatcatcttttccacccatattatggagctggcgctggatctctgcgacgagatcgtgatcctgaaccacggcactttagaggtggtggacaaggcaaacctggataaccaggattttaaggacaagatcattgcggccctgaaggaggaggaccatgtttaacgcctttcgcatatccttttccctcaagaatacctatcgggtcaacagcattttatatgccatcaaacagctgccgctgatcaaaaggctgctgcccaattcgctctatgccagccgggggctaaagacctttgcaaacgtgctttcggctatctgggaggtgatctctaccttttttgggaaggggatctatctgctggcgatggtttttagcctggggctgctatatcaagatgttccccagggcgacttgtttgggcatatgctgctgtttttgactgcgatcggcgcatatatgaatacctatatgttcaaccccacgaacgataagtattacgccatggtactgatgcgaatggatgcccgggcctatacgctgtccaactatacgtatgccatgctcaaggtggtcataggctttttgccgctggcgctttgggtggggacgatgcaaggggcgccgctttgggtgtgcctgttgatcccgttatttgtagccggcgccaaactaatcgccgcatggctgtttctgctgcgctatgcgcgtaccggggaggcaataaatgagaacctgccgcccaagatcgcctggccgctggcgggcgtgctgctgctggcggcctatggactgccgcttttaggcatcgtggtcccggcggctgtatttggcggggtcgccattgccatagtgctggcaggggtttatgcggctataaagatcgcgcgatttaaagagtaccgcgccatgtatcagctgatcctggcggataaaaagacggggctggactataaaaaaacggtgcagcaggctactcaggaggccagccgcaagtctatcagcgcggatatccatattaccagccataaaaaaggctttgagtactttaacgagctgttcgtcaagcgccaccgcaaggtgctgtggcggccagccaagcgagtagccgcaatagcgctggcctgtgtggccgggctgctgctggcctttaaattgaaccctgagatcagtcaaaagacgaacgagctgctcatgagctttttaccgtacttcgcgtttatcatgtatatgatcaaccgcggcacatcctttacccaggcactgtttatgaattgcgaccacagcatgctttcctacgcattttacaaaaggccggattttatcttaaagctgtttcgcatccggctgcgggagatcatcaaggtcaacttgttgccggccgccgtcatagggtttgggctggcgctgctgctttttgcttcaggcggcacggctaaccccattcattacctgatcataccgctttccatcctggcgatgagcgtctttttctcggtgcattatctcacgtgctattatctgttgcagccctataacgtcaataccgagatcaagagcgccacttacccggtggttacctggatcacctatatggtttgctttgttttgatgcaggttcgcatggatacgctggtattcggcgtcatggccagcgcgttttgtatcctttattgcatcgtggcctgcatattggtatataagttagcctataaaacctttaggttgcgcagttagtcaggcgttaaaattagcaaaaccgcctatgaaaaaggatggaaaaagtgtatactgttatataagtaaaaagacaagtagcggggcggttgcgcccgcatagaagtgggggtaatattaatgttgcaggcaaaattatcagtatccaaagaagaagcgatctcgactatcgacgaacggttgtatggctcgtttgtcgagcatttaggccgggcagtctatggcggcatttatgagccggggcatccgctctcggatgagcacggctttcgcaaagacgttttggagatggtgcgggaggcacgcgtacccatcgtacgttacccaggcggcaactttgtatccggttataactggcgcgatgggatcggccctaaagagaaacgccccagacggttggagttggcctgggcggccattgagaccaatcagtttggcatcgacgagtttgcggactggtgccgcgccgcgggcacccagggaatgattgccgtcaacttgggtacgggcacgcctaaggaagcggcggagcttttggaatactgcaaccacccgggcggcacggcgctcagcgacctgcgcagggccaacggccacgcgcagccgcacaattttcgcgtctggtgcctgggtaatgagatggatggtgcctggcagatttgcggattgacggcggatgaatatgggcgcaaggcacatgaaaccgccaagatgatgcgctgggtcgatccggatatccaactggtggcctgcggcagctcgaacatggaacagccaaccttcccggtttgggatcgcaaggttttggaatacacctatgaggatgtggattatctctccctgcaccgctattacaagtacaagggggatgccaaagagttgatcacctcctttgcggatatggaccggtttattgataccctgagcgcgacgatcgactatgtcaaagcgctcaagcgcacgcgcaagcaggtcaagctatcctttgacgagtggaatgtatgggacagcgagatgccactgcccggccgttggctggaggggccggaatcccatcagcagtattatacgttgctagacgcgttggcggtgggcggtatgttgtgcacgctgatcaaccactccgaccgggtgcggatggcctgcctggcgcagctggtcaacgcgctttcgccagtgctgacgaaaaacggcggcggaatggtcaagatgcccacgtactatcccttcatgcaggtatctaccctggggcgcgggcaggcgttggccgtgcgggtgcaggccccgatggttgagacccagcactcgggcgatgtgcgcaccctgcaaagcgccgcggtgtacgatgagcaggcgcgcgaagtgcgggtatttgcgctgaactgtaatgaggaggatatgcttttaaacctgcgtctggaggactttgagggtgaactgcgtatggtggagcataccgtgctggacggcgaggatctgatggcggtgaacgattttgacgcgcctgagcgggtcaagcctcatacggcgccttgcacgcccgttgcgggagaacgcgcgcagatccgtctgcccgcccaatcttggaacgtgatgcgcttccagatataaataggataacaagggctttacgcccatggattgcaactttggaaggaggccgctatgcgggtagttaaagtaggttttttagggtttggcaatatcggttcaggtgtttatcaggttttgcgggataatgctgacctgatcgagcatcgggatgggctgcgctttgaggtcaagcgcatgctggtacgggatgtgaataagagccgcaagttcatggtcggcaccaagctgaccacagatgtggccgatatcgccggcgacccggagatcgagttcgtctgcgaatttatggggggcattcaccccgcccgggagtatatcctagaggtattgaaagcgggcaagaccgtgatcacagccaacaagcaggtgctggccaactgttggccggaattgcaggccgcggcgcaggaaagcggcgcggggctgtactttgaggccagcgtggccggcggcatccccatcatccgcaccatgtgggattccatccaggcgaaccatatcgattcaattatgggcatcatcaacggcaccaccaactacatcctcacccgcatgacggaggagggcttaagctacgaagaagtgctggagagtgcgcagaagctgggcctggccgagcctgaccccaccagcgatgtggaggggtatgacgcgatgtacaagctctcgatcttggggtcgatgggcttccatacccggctgcctatcgatgtgatctatcacgagggcatcaccaaggtgaccaaagaggacatcgcctacggcaaggagatgggctataccctcaagctgttggctatcggcaaaaagcggggcaatgaggtggaggcgcgggtacacccggcctttatccccaatacccatccgctggcctcgatccgcggcgcctttaacgctgtgtttatgcatggcgacgcggtgggggatctgatgctgtacgggcgcggggcgggggacctgcccacggccagcgccatcatttcggatctgatctacgcctgccatcaggataaacaccggtacatgacctttaagaaccagcccttcctggacccgggaacgaccatcttggaggattgggagagcgagtactatttgcacgttaaagtagtagataagcccggcgtgttggccaagatgacccagatctttgccgaccatgaggtctccgttgcctcggtgttccaaaagaatacctcggccaaggagggatcggcctcggtggtgttcgtcacgcacaagacccgggagctggcgatgaagtccgttttgaaggacctggaggccgaggcggacgtgctggagatcaaaaactgcatccgcgtggaagagggagagcaggacgcttaagtttgcttaaggcttacaaatagaaaggatgaggcaaaatgctgtttaaacctgaacaactggacaacgaactgcgccatgaggtgcgcggcggcaagggcgatgtgcgttttatcaccctgcccaaggatcagctgcccaacaagacccgcctgttcggcaccattgtgatcccggagggctgttccctgggtgtgcatgaccatgtgaacgagacggagttctattacatcatcagcggtaccggcatcggcgacgataacggcaaacaggtgcagttcgcccctggcgacatcatgacctgtggcaatggggccacccacaatatcgagaacaacggcaagggagatctggtgctgatcgcctgcgtcgtgctggactgatgatgcgccagtaatacgagagatcaaagcccgctgcttttacgcatcctgcgcttgagctgcgggttttttgattcaataccggaggtaatcctatggcatttcagagctgcgagttggagagctttgcggtgatcggtaaagagggatcgaccctggagggggagggattcattcagcgcttgtggactcaggctaatcgggatttttggcaggtggaaccgctggcgctgcgcaagggggaagagccagttggattctggggggtgatgagcgatttttcccgcagctttgcgccctggacagaagattttactcagggaatttatctggcgggcgtacaggtgccgttggaggcgcagccgcccgaaggctggatccggtggcaagttccggcttttcgctacatgtatgcggctacaagaggggattatcaggaaacctttcgggcagggctggcttatattcgggagaatgggctgcagctagcaggcgcggttcaggagtatacctgcccgcaggaagaacagctttatctgttttttcctatcgcgcggctgtaagatgaaggattcactatcggccttagcagggactaggatgttgatcgtaaaaagcggcagagcctatgctctgccgcttttacactaaagttatttctttttcttatctttatcccgaaggtgattgcgccggatcttgccggagatggtcttgggcaactcctcgacaaactctaccacgcggggatatttgtaaggcgcggtgttcttctttacatgggtctgcaattcctttgccaagtcgtcgctggcctcatacccggcggccagcacgatggtcgccttgaccaactgaccgcgcaccggatcgggtacgccggtgatggcgcattccagcaccgctgggtgctgcatgagcacgctctccacctcaaagggcccaatacggtaaccggaggatttgatgatgtcatccgcccggccgacaaaccagaaatagccgtcctcatcccgccaggccaggtcgcccgtgtggtacacgccgcctgaccagcagctttgcgtcagctcctcggcccggtaatacccctggaaaaggcctacaggcttgccgtcgccggtatagatcaccaattcgccctcttcgcccacgtcgcagggacggccctgctcgtcgatcaggtccacatggaaggcgggggagggcttgccacccgaaccgggtttggcctccagcatggtaaacgtgcccaggatgggggtggattcgctctgcccaaaggcctctttaatggtgatgccggttgcctcgcggaattgattgaatacctcggggttcagtgcctcgccggcagtggaggcgtatttcagcgcagagaaatcgtacttggatagatcctccttgatgataaagcgatagatcgtaggtggtgcgcagaaggtggtcaccttatatttggtgatgacttccagcagatcctttggtacaaatttatcaaagtcatagataaactgagctgtgcccgcaatccactgcccgtagatcttgccccagccggccttggcccagccggtatcggccacagaaatgtgcagcccgtcgtccaccacgttatgccagtatttagcggtaatgatatgccccagagggtaggtataatcgtgcgccaccatcttgggcatgccggtggtaccgctggtaaagtacatcaacatggtatcattgttgtgaggcagatcctcatctgcgggcttttggaagatgaccgactcttccgccagggccgcgtccgcatctacccatccctcgcgctggccacctaccaggagcttattctccaagctggggcagatggcgcccgccgcatccactgcagaaaccagcggttcctcatcccaggcgatgatggtcgtgatatccgccgcatcgcaccggtagacgatatccttggccgtgagcagatgggtcgccgggatggcgatggcgcccagcttatgcagggcatagatgtaaaaccagaactcataccggcgttttaacaccagcatgaccgcatcgccctttttgacgcccaaacggcgcagcaggttggcggcctggttgctcttttccatgatgtccttaaaggtaaattccgcttcgttcccctgcacatcgcaccaaacgatggcgcgcttgtcggggtactctttgccgtaacgatccacgatgtcataggcaaagttgaagcgctcgggcacctttaaaatataattgcgcgcaaaatcctcgtagtcggtaaattccgtcttcaccaagtagtcttttaaaaagttggccatgaaagttatgctcctattctagtgggaagcctcctgcagcacgacgatggcgatgaacttgacaggcttgtcgtccagcgcctgcatgccgtgggaatagcctgaatcatagataatggaatcgccctcattgaggattaattccttatcatgcagcgtcaacttcatgcgcccctcgatgatataatcgaactcctgccccgcgtggttgtggggcaccgggggcatatccggatcgatctccacgtacagcggctcgaccgcccggttgctgaagttaaaagccagatcttgaaagcggtattcccggtggcggttcactggcacgcccttgcccttgcgtaccaggcaataggtatgcagcttggcgtcgtcgcccgtcagcagtacatttagctccacgttaaaaatgttggatagtttgtaaagcacgccgataggaatatcggtagtgccctgttcatactgctcatactgctcaaccggaatggcgagcaaattggcaacccgctcgacagataagtccgacaactctcgcatttccttgatcctgcggatcatctccataatctgttcggacatcatttagaccccctttggtgaaagttcgcatcacttcttattaaaatcattgtcttattatagacgccgctggaacaaattgcaagtgatttaaagtgtgattgcagccgatcgcaggtagcaattttgcgctggggcaattcgcgtaaaaaacggctttcaaaggtattggaggatatgatatactactgttaaaagccgaagaaacggggcgcagggctgggcgcgccatcgccaaagatgaaggagggccttttgaaatgatcaaacacgtggtttgctacaagttaaaggataacagcgaggagaataagcagcgggtgatcaagcggatgatgatggggatgaaagaccgcattccggggcttttatccatcgaaatggggtcagattttatgggctcggagcgctcgtatgacctggtgctgatcgagacctttgccacccgcagggatatggacgggtacctggcccacccggcacaccagaacgtgcgtcgttttatgaaggaagtgcgtacggattccgtggcggtggacttttacttctaagatcgatgagatgcgccgcgcgccctttaaagcccaccgggtgcgcggcttttaccgcttaacgcatttttttcaggttgattttttgcttgaggtggactataataagcggtaaatggcgatgatggagtttcgcacgggtgcttaaggggcagcggcagagagggagatccaccggctgtaaggtttcccgccctggcatcgtggcgcggtttcgctccggagttcggcggctcaaaccgggtgtttccccggcggtaggccggcgcgggaaggaccgttatatccggagctgatgaggccgcgcgcctgtaagggccagcggcgaagttgggtggtaacgcggagcatgccttcgccccatgtaagaggggcggaggctttttattgcgttaaaatggatgccgcatactgtgcggataaaagtggaaggagcaaggatgatgcaggaaaaactggcggcaattgaggcggctgcgctcaaagagctggaaagcgccgcggcgagtgctgatgtggaagcgctgcgcgtacgcgtgctgggcaaaaagggagagctgacggggctgatgcgcggtatgagggagctgagcccggaggagcggccggcctttggacagatggtgaatgaaacgcgcgccaagattgaaagcgcaatggcgtgtaaggcgcaggaattggcccaggccgaaaaggaggcgcgtctggcagcggaggctattgatgtgacgctgcctggtaagattgcgccccggggcaaattgcacccgctgactctggtgctgcgggagctggaggagatctttaccggtatgggctttacggtttccgaagggccggaagtagagctggatcactacaattttgagctgctcaatatccctaaagatcacccggcacgggacatgcaggacagcttttattttaccgaaaatatgctgctgcgcacccatacctcgcccatgcaggcccggtatatggagaaccataagccgcccatccgcatcatctgtccgggcaaggtttaccgggtggacgaggtggacgccacccattctccggtctttcaccagatggaaggcctggtggtggataagaatatccgcatgagcgacctatacggcgtgctggacgtgttcgccaagagcctgtttgggcctgaaacgcgcaccaaattccggccgtcttacttcccctttaccgagcccagcgcagaggtagacgtaagctgcgcggtgtgcggcggcaagggctgccggctgtgcaagggcacgggctggatcgagattctgggctgcggcatggtcaaccccaatgtgctggctggctgcggcattgatccggacgagtacagcggcttcgccttcgggtttgggttggaccggatcgccatgatcaaatacggcatctcggatatccgcctgttcctggagagcgacctgcggttcctgaaacagttctaagggagggaagaaaaatatgctggtacccatgaaatggttaaataaatatgtgaagatggatcttccggtggcggattatgccgcgcggatgattatgtctggctccgaggtagagggctggaccgagcagggcgagggactgaccggcgtggtcgtgggtctggtcgagcagatggaggatcatcccgacagcgaccatctgcatatcctgcaggtgaatacgggagatgaaaagctgcagatcgtctgtggcgcccccaacgttttcgccggggcgcgcgtgccggtggccaagatcggcgcggtgctgcccggggattttaagatcaagcgcagcaagatccggggtgtggagtcctttggcatgtgctgctctggtcaggagctgggcatgaccgaggccgatatcgccggagccgaggtggacgggctgttgatcctgcccgaaggcacgcctttgggagaagacatccgcaaggtcgtgggctgggatgatgtggtggtcgaattcaagtcgttggctaaccggccagactgcatgagcgtgatcggcatggcgcgagagaccgccgtgacattgggcgagaccttgaaactgccggagatctcggtgcaggagaatggcgaggatatccacgattatgtcacggccagcgtggaggatgcggacctgtgcccgcgttatatgctgcggatggtgaaaaacgtcaaagtcggcccttcgccggattggatgcaaaaggcgctttccgccagcggcgtacggccaatcaataacattgtagatgtaaccaactacgtaatgctggagatgggccagcccctgcacgcctatgatatggcctatgtggccggacccaagatcatcgtgcgccgggccaaagcgggcgagacgatccgcacgctggacggcaaggatcatgcgcttaaagagaacatgctgatgatctgcgatggggacggccccacgggtgtagcgggcatcatgggcggcgagcacagcgagatcgtagacggcacgcaaaatgtgttgctggaggcggcgtattttagcggctttaacatccgccatacagcgcgggagctaggcatccgcacggaggcctccacccgctttgaaaagggattggatatttataataccgaaaaggcgctggaccgcgcggcgcagttaattgcccaaatgggtgcgggcgagatcgtgggcggaaagatcgacctgcgcggcgagctgcccgccgccaagacggttttggccccctgtgcacgcatccgcgcgctgacgggggtggacatcccctcgggcgaaatggtgcgcatcttaaacgagctggagattgcaaccacgctggatgagcgcagcgataccctgcactgcaccgtgcccacccaccgcggggatatcaaccatatggcggatatcgccgaagaggtgctgcgcatctacggctatgacaagatacctgcgaccctgatggacggcgccctgatgcggggcgggttgacccgggagcagcagctgggcgataaggtgcgggatgtgctggtaggcttgaacctttacgaagcgatgagctattccttcatcagcccggactggatcgaaaagctgggcgtgcctcagggccacgccgcgcggcacctactgcgcatctccaacccattgggcgaggatatgagcgtgatgcgcaccaccatggcgcccagcctgctgaacctggtctcactgaaccagcgccagcgcgcgggcgagatccgcatgtttgagatgggcaaggtctatctgcccacgcaggagaatccgctggagggccagccggatgagcggcctacgctgggcatggttctgctctctgcgcaggatgacttttttactctgaagggtattatcgagcagatggcgcaggactttggcattgaggagctgagcttcaacgcgcagggcgagtgctggtaccaccctggccgcaaggcgacggtcagcgccgggggcaaggtcttgggccagctggggcaggtacacccggatgtgtgcgaggccttcggcgtcaagggcgaggtgctgctggcggagatcgacttgcaaagctggtatgcggcgtcctctgaggcgcgcagctttgaggcgctgccccgcttcccgggcgtgagccgggacctggccgtggtggtggatagtatccagccggtaggccccatgatggagagcatccgcaagggcggaaaaccccttttggcagaacttcagctgtttgacgtataccagggggcgcagctgcccgagggcaaaaagagcgtggccttctcgctgctcttccgctccagcgagcgcacgctggtggacgaagaggtcaataaagcctttaaaaagatcgtctcccgtctggagcacgagtatggcgcggaactgcgcgcttaattggaacgaagtgaaaagcagccgagcggtgtgtccgttcggctgctttttcgcggggtcatgctcgcctagcgggatggggtatgatataatataaaggctgtcatatattagggaagacgccgggaaggggaagtgaacattgggacaggaactgtggatggcgctgtgcgcggtattgggcatcctgctggttattgcggtggggatgctgctgtttacccgccggccggataagcaactggggcgcgcgctcaaagaagagggggcgctgctacgcagtgagaccgggcgggcgctggcagaaaaccgccaggagatcgctgctgccatccgcgggatgaacgactcgaccgtgcacgccctgtccgagatcacccgcacaaacgatgcggcctttgcacgcctgcgccagggaatggaggggcggatagccgccatggcgcaggataatgcgcggcagttagaacagatgcgccaggtggtagacgagcggctgcagcaaacgttggagcggcggctgggcgagtctttccaaacggtgagccaacgtttagagcaggtgcaccggggccttggcgaaatgcaggtgttggccgcggacgtgggcgatctgcgcaaggtgttgaccaacgtgaaggcccggggcacctggggagaggtgcagctgggtgctattttgggggatatcctcacgccggaccagtacgccaccaatgtcagcgtggtgccgggcagcgcagagcgggtggagtttgccgtgaagctccccggcgcgggaggcgaggggacagtctacctgcccatcgacgccaagttcccgcaggaggattacctgcggctgctagaggcgcaggagaacggggccactcaggcggcggccgaagccgccaagcagctggaaagccgcatccgcctggaagccaagcgcatcgcgcaaaagtatatctgcccgccccatacggtggattttgcgatcatgtacctgccgacagaggggctttacgcctatgtgttgcagtgcccggggctggccgagcgcctgcagcgggagcaccgggtggtgctgggcggccctacgacgctggccgcgctgctgaacagcttgcagatgggctttcgtaccctggccatcgaaaagcgctccagcgaggtatgggcgctgctggggcaggtgcgcacggagtttgagcggtttgcatcgttgctagaaaagacccagaaaaagctgcaggaggccagcaatgtgatcgacgacgcctcacggcgcacgcgggtgatccagcgcaagctgggcagcgtgcagggcgaggcgcacgaatgggaacaggaatagggagagagggaaaaccatgcgcgtattgtttttatcggtgaccgcggggcaggggcataacgccaccgcgcgggcggtgatgagctatctactggaccagggcgtggagtgcaccatgctggataccttccggtatatcaaccgggtactcagccattccatcgaccggggttatgtgaatatgacccgttttaccccggagatgtggggcaaaatatacgatgcgatggacgaggcggaagattctaaaaatctgaacaccatcaataccctgatcagcaccctgctctccaaaaagctgaccactttcatccagcattatcgcccggatgtggtggtctgcagccatgtattcccggcgctgatcctaaacgccttaaagcggcaaaacgcgctggactttaactttaaatccatcgggatcgtcacggattttaccatccaccccttttgggaaaagacagggttggactactttgttaccgcctcggagatgctggaatatctattgaccaaaaagggaatcgggcgcgagcagattctgccttttgggatcccggtccatcccaaattcagcgcccagcctttgagcaaggcagaggcgcgcaaggcgctggatatcgccgataagcgcacgtttttgatgatgggcgggtccatgggctttggcaatgcggtagacgtgctcaaagagctggatgagctgaacgaggattttcagatcctgatggtatgcggcagcaataaaaggttgctcaaccgcgtaatcaaactgagcgctaacacccggcatgtgattgtgccctatggttttaccgaccaggtggaggtgatgatggatgcctcggacatcctgctgaccaagccgggcgggctgaccacctccgaggcgctatgcaagggcatccccatggtactgttggagcccattccgggactggaggaccgcaacctcatctttttgaccaacatgggccttgcggtgcgcatttctgagcgtgcgccggcagacgaggtggtggcacagctgctgtttaacgagatgcgcctggggatgatgcgctatgcccagcagcagtttggcaagcgggatgcggcccggcgcctgggcgagtttattctgggcttggaaaagcgcagggaagaggcgaaattcccctttgccgattaagcgccccaagcccggcttgaccggggtttgaggcatgacctataatgaagatgaatgggcggaccgcaaaaatgcccgcgcagggcgcgatagatcccagcgcgtttgcccgaatgtgagggaggcaaccaactttatgcagatctataacacccagacccgtaaaaaagaggaattcgttccgctggttcccggcaaagtgggcatctatgtctgcggccctacggtatatgattttatccacatcggcaacgcccggcccaccattgtgtttgataccctgcggcgttacctagagtatcgtggttacgatgtaaagtacgtgcagaacctgacggatatcgatgataagatgatcgcccgcgccaatcaggaggggatcacggtaaaagagctgggggagcggttcattgccgaatactttaaggatgccgattcgctaaacgtgcggcgggcggacgtacatccacgcgccaccgaccatatcggcctgatcattggaatgatcaaaaagctggagaaaaacgggaaggcctatgccgtaaacggcagcgtatatttctccgtagcctcggatgcggattatggcaagctctcgggccgagacatcgaggagctgatgagcggcgcccgcgtggaagtagacgacgaaaagcgggacccgatggattttgccctttggaaggcggccaaacccggcgagcccagctgggattccccctggggcaaggggcggccgggctggcatatcgagtgctcggccatgtccaccaaatatctgggcgagacctttgatatccactgcggcggacaggatctggtgttccctcatcacgaaaacgaggtggcccagtccgagtgcgctaccggcaagccctttgtgcgctactggatgcacaacggctatatcaatatcgataatcaaaagatgtccaaaagcctgggcaacttttttaccgtgcgggatatcggcaaggagttcgacctggaggccctgcgcatgttcatgctcagcgcccattaccgcagccccattaacttcagccgcgagctgatcgagcaggctaaaacggcgctggagcggctgtataacgccaagcgcaatttagaatatcttttggggcatgctaaggatgaggtggccgaaaaagatgagacatttatcaagggcctggatggctggcgggataagttctgtgcggctatggatgacgacctgaataccgcggacgcgctgggcgtattgtttgaggccgtgcgcgagatcaacagcgtttgcgatgcggacagcggcaaagcggcggtacaggccgcgctggcgctgctgaatgaactgagcggcgtgctgggcctgctctataaggaaacgcaggtggaggacccggagattttggccctggtcgagcagcgcacccaggcccgcaaggataaaaactgggcggagagcgaccggatacgggatctgctcaaggaaaagggcatcgtggtggaggatacgccacagggggccaagatccaccgcgtgtaaaacggcagccgctctaaacagccttggcggcaaggcggaaagaggggatggtatgcagcacatccaaaagtttaccattgaggggttccgcgcgctgcgcggggtggcgtttaacggctgtgaaacgctgaacctgctgatgggcgcgaacaattcgggtaaaacgtcggtcctggaggcgctttcgctgctgggaaagctgcgcggggccagacgcacccggagcgagcggccctttcaggggccggtgaacgcagccgcgccacgggtcgagatctctgcactggttgaaggggcgcaggtagacctggccattgaaaatatcgccctgggcggagcggcccgcatccagctcagcgtagatgggcggcgtatgcaggctgaccggctcgagcagctctaccgccagcaccctttggatatgccggtaagctatatttcccccgccgtccattatggatgggagaacgagcggatccccatgtttaaagaggcttggcaggcggatattctggaactgctgcaggattttgatgcgcatatccactcggtttatctggaggaggcgggcgtcacctttgcgcgcagcgcgcagatcggcgatgcgccgctggccaccgtgggggatgggctgcgcaaggcgtttgccatcggctgcgcgttgctcagcgtaccgggcgggctgctgctcatcgatgagatcgaggcggccatccaccccaacgccctgccggttttttgcgagtggctctataaaatgtgccgcaaacaccgggtgcaggcctttgtgacgacgcatagcctggacgccatcgatgcggtggtggacgccgtgggcgaggagggcgaaggcctggcgggctaccggctggaggcggaggagtacacccgggtacgccgcttttccgggcgcaggctgtatgaaatgcgcgcactccagggcctggatatgaggtgagagatgcggtacgtatattttgcagttgagggtgcgcacgatgcggccgctatcggtaagattctgcggctagagggcttttggcaccaccggcgtgccaaggaattgccgccggcctttcgctcgatgattcccacccgcttccctttctggggggacgatctggaggctgacgcgcccatcccttacttttatacccggggcgagctgggggtggccgtgcgcatggctggcggcatcgggcggatatgccagaccatagacgatgacttttacgctatgcagcagcgctatgtgcgccagtaccgcggtatcggcgtggtgatcgatgccgacgagatgacggcccaggaggcgcgggaacatttctaccgccgcttaggctatgctgacgcccgcaaacaggagcgcgagggcgaaggtttatgtttttcccgccgcttatttgacgagggaaaacaaaaggtgctggacgtttcgatgcggggcggcgtttacgtgctgccggacgatgcgcagtctggaaccttggaggatttgctgatctccgggggcaatatcgcctttcccgagatcgtcggcgcggcaagggactatatggataaggtaggcaagcgtctgggctctcagccgcccagccatttgaacaaggctttggtgggctgcgtgggcaacgtctttaaccccggcaaggccaaccagatttcgatctaccgggatgcgtggatcagcccgcaaacgcgggagggcagcccggcggtggatggattttaccgctttattacggaatttttggagcgggcacagtgaatggaaaccaaagaaaacgggggtcatgtagatggataaggaagttgtattgcaaaagatcagagacgtgggcctggtggccgtggtgcgggcggaaaatgccgatagcgcgcgcaggattgccgaggcctgtctggagggcggcgtagcggcgctggagatcacctttacggtgcccggtgcaaaagaggtgatcgccgatctggcccggacctatcaaaagggcgagatcattttgggcgcgggtacggtaatggacccggaaacggcgcgtatctccatcctggagggggcgcagtacgtggtcagcccctatttgaatttggatacggtgcgcctttgcaaccgctaccgcatcccctgcatgccgggctgcatgtcggtcaaagaggtggtggaggccatggaagccggggcagatatcatcaagatcttcccgggcgagctgttcggccccaagatcatcaaagcgatctccggcccggttcctcaggcgcgcatgatgcccaccggcggggtaacggcagataacgtggcggagtggatccgcgccggggcggtagccgtgggcgcgggcagctcgttgaccggcggcgcaaaaacgggggattatggcgagatcacccgcgttgcccgcacgtttattcaaaacatccaagcagcgcgcgcggcgctgtaaggggcgggcgtatatccttcatctatcgtaaaaatatctcgatgggccgtggcgaatgcgccgcggcctttctattttctccgcagggcgcatatctttaagtatatcgggcgggggtattccattggccgtaaatctttagcggggcttgttctatccgggtatatcggggcataccaatggagtaaacccatataaataacccatataaacgggttttggaaggatgctggagaaaatgtatcgagagatggatgacaaaaaacctatgcgcgtacggcagcatacgattatgatcgacaaccgcgagcgcgtggtcatcaccggtgtgcaggatgtggacagctttaacgaggtagaagtcgtactgatgaccgatgtgggcatcctgagcatattggggcaagatctacacatcgctaagctctccctggacgaggggcagctggtgatcgaggggatgatcgccgcggcggactataacgatgcccagcccgcacaaaagggcggcggaggcctgatgtcccgctttttcagataaagaggggtagcgcttatgctgatggcgacagtgaaccagggctacgtttttctgtgcacggtaggcgcgggcgtggcgatgggcgtattgtacgacggcgtgcgcattttgcgccgcaccctgcatctgggccgggtcctgacttttctgctggatttggtatattgggcggtggtactggtggtggccctgtttgcggtgctttacgccaacgaaggggaagttcgtccctttaccattctggggtttgcgctgggttgcgcgctgtacctgatcggctttagccccatcgtgctgggcatatggcgaggggtcatggcggtggcgcgtaaaatcgccggatttgggccgatcgcggcgatccgcaaaattttttccaagtaaggaagggttttcatttgccagcgtcgaatacacaagctaacctgtctgtaacataggtttggtttccttttgtgcagatatggggaaagacggcttggaggaaagatgatggcaaagacgaagcggaagatgagccgtaagctgaagtggataatctcgtgtgccgtaatggtatacgtggcggttatattgatacagcaacaggtgcagatgcgggatcaggcggcgcaaatggccgcgatccgggatcagatggcccaggcgcaggcgacgaacgagcagctggaacgggatattgcatttgccaagacggacgagtatatcgaaaatgcggcgcgtgataagctgggctgggtgcgcgaaaacgagatcatcttcatggaagataactaaggccctaaggggacttttttaagactgacggcttaaagggggcaaattcgggttttttatggcaatggaagtaggcgcaattgtcgagggcaaggtggaaggcatcacaaattttggggcttttgtccgcctggagtctggcgaaacggggatggtgcacatctctgaagtggcggacagctatgttaaagacattaacgagcacttaaagatcgggcagaccgtaaaggtgcgcgtgatgaaaaacgacgctgaaaatggaaggctgagcctgtccatccggcgcgcacagcctgtaaaggcgccgacggcgccgcccgtaccggcctggaacaagccggcccgcccggcttcaaacgcctcgtttgatgatttgatgagccggtttatgaaggatagcgaggagcgccagcaggatgtgcggcgtcactccaataaaaaacgcggttcgtcctttggccgcgggaaatagcagcaacacgcatcctcgaaatattcggggatgctttttttgaaaggggtatctaatgcgtaaaacagttgcggtgatcgatatcggcacccagacggcgcgcctgctggtcgccaatgccgatgaacagaaggtaaagcttgagccagtggcgcgggacatccggggcgtaagattaggcgaaggcgtggatgcgctggggcacttgtcgcaagccgccatggcgcgggcggcggatgccgttgcggactttgcccgccaggccaggactttgggcgcggtagagatctatgcctttgcgaccagcgcaacgcgggacgccgccaaccgggacgagctgataagcctattacagcagcgggcaggcatagcgctggatgtactggacggagagcaagaggcgcaggtagcctttcgcggcgcggtgggcttacgtccggggatacagggcgtgatcgacattggcggcggaagcacggaggtgttgatagggcgtgatggaaagcccttattttcccgcagcttgcagatgggcgcggtgcgggcgggggagcgatttggctgctttgacgtgcaggcttatgatgctttgcgggcgggcgtggaggaaatgttccgaaacctggcccaggagatcgccgcacttgcgctgcccgccccctgttggacaggtgtagccggcacactgacgacgctggccatgtggcagctgggacttgggcaatatcagcccgaaaaggttcaggattttatgctgacggcccaggacacaggccgcctggcggacaagctgtatcggatggaccgggaagcgcggctgggcatcccagggctggcgccttaccgcgcggatatcatcgggccgggctcgggcattgccagtagtctgatgcaggcgctggggatcggcgagatccggatatcggacagcgataatctggaagggtatctttaccaaaaggtattacatgcgcttaaataatcgtaaggataaataaaagccccttcggaacaatccgaaggggctttcttatagggcttattccaccgttacgctcttggctaggttgcggggcttgtcgatatcgcagcccttttccagcgagatgtaataggccagcaactgcatggggatgattgccagaatgggcgctagcatgttggataccggaggcaggtaccagacgtaatccacctcgttatcgatctgatgattgccgtcgttgaccagggccagcactttggcgccgcgtaccttaacctcggtaatgttgctgagcatcttttcaaacaaggcgtcctgcgtagccagggcgacgaccagggtgccctcctcaatcagggcgatggtgccgtgcttcagctcgcccgccgcgtaggcctcagaatggacgtaagaaatctccttgagcttgagcgaagcctccatggccagggaataatctacgccgcgtcccaggtaaaaggcatgctcgcggtcaaaaaactgatgggcgaacttttgaacggcgtccttttgatccaggatcagctgggccttttgcggcagctccaacagctcgccaaggatgccgctgacctgggctgcatccattttgccccgtttgaggcagaagtccagcatcagcacgtacagtaccatcagctgggagatgtacgctttggtagaggccacggcgatctcgggcccggcccaggtgtagatcaccttatcggcctcgcgggagatggtgctacccaccacgttggtaatggccagaaccgtagcgcccttttgctgggcatcccgcagggcggcaatggtatccgccgtttcgccggactggctgatgacgataaacagggtgttgggctgtacgatgggatcgcggtagcggtattccgagccgatatccacatccacggggatgcgcgcatatttctcgatcatcgccttgccgatcagtccggcatggctggccgtgccgcaggccagaatggagatatgctcgatcttgcgcacttcatccgcgcccaggggcatcatatcctcgcgcaggctgggggcctcgccctcctgatggttgatcagcggcagcagggtatcccgcagcgccgtgggctgctcgtggatttctttaagcataaagtgctcatatccgcctttttccgccgttttgatcgtccaatcgatatgcatgacctctttttcaatggggtcagcaaaggcgttgtagaactggatgccgtcccggcgcagcaccgccacgtccaggtcgtccatcaggtacacatcccggctgtactccaaaatggccgggatatccgaggccataaagctgccgtgatcggtagcgcccaccaccagcgggctatccttccgggtgcagtaaagcgcatccggctcgtttttgcaaagaatgcccagcgcaaaggagccgcgcagcagcgggagcaccttgtagatggtcttaaggatatccccttcgtaataatggttaagcaggtggacaattacttccgtatcggtctcagaaacaaagcggcagccctgctccagcagccactctttcaactgaagatagttttcgataatgccgttatgaatgatggcgatctcgcccttcatatcggtgtgggggtgagagttgatgtcgctgggctcgccatgcgtggcccagcgggtatggccgatgcccatcgttccctcgcaggggtgccccttcaggcgctcacgcaggttttgcaggcggcccttcgccttgcagatctcgattttttcgccgtcgtaaacggcgatgccggccgagtcatagccgcggtactccaagcgcgccaagccgctgagcaatatgggcgttgcggggcgtgagccgatgtatccgacgatgccacacatagtaaagcctccttaaaatatcagctaaatagcatataatccattccatttttacgcgtcattaacctagattataacaggaatcaacatctttcgtaaaggatgagacctttaaataaattgtaaaagcgctaaaccagccgcactggtatatggttttgcgccaaataagcctttaactctggaatgggcagctcctgaaagtggaaaagagaggccgccagggctgcatccgccatgccgggctgcagtacgtccaaaaagtgctctttgctgcccgcgccgcccgaggcgatcaccggcacggagaccagctcgctgacgcggcgggtcacctccaggtcaaacccggccttggtaccgtcggcatccatgctggtgagcagtacctcgcccgcgccgcgggaaaccccgtaggcgatccattccagcgcgtcccgcccagtgggctttttgccgccgtaggcatagacctcccagccgctgccgtcctctttgcgcttgacatcgaccgccagtacgatgcattgccggccaaagcgcagcgccgcctcctcgatgaaatccgggttacgcagcgccagcgagttcaaagataccttatccgccccgcgcagcaatatctcccggatctcgctaatgctggaaataccgccgcccaccgtaaaggggataaagacctgctcggctgtgctggccacgatgtccagcatcgccaaccgcccctccgtggaagcgtcgatatccagcagcaccaactcgtccgcgccctcctggtcgtagcgcttggcggcctccacagggtcgccggcatcccggatgccgacaaagttaacgcccttgaccacccggccgccccggatgtccagacaggggatgatccttttagccagcataaaccgcgccctcctcgtttttggcgtttttcagctcgccaaagtttttaagcatttgtaaaccgacctgcccgctcttttcgggatggaactgcaggccgaaaaggttgcccttttgcacggcgctgataaaggggccgccgtaatcggtggtcgcggcaatatagtccgcgcccgcccggtagggcaggtgataggagtggacgaagtagacactggccccctccttcaaacccttaaacaggggacagggggagaggtgcaggctgttccagcccatatggggcactttaaggccgggtttttcctcaaataaggtgatctcgcccggcaagaggcccagaccctgccattggccgtcctcatagcttttttcaaacatcatctgcatccccaggcagatccccaaaaagggcgtgccgctgttgactgcttgcagcatagtttcgataagcccggtatcagtcaaagcgcgcatcgcgtcgcgaaaggcgcccacgcccggcaggatgatgtggctggccgccgcaacctcgccggggtcggcggtacgcttggcctcaaagcccaggtattgcagcgccttttccacgctgcgcaggttacccatgccataatcgacgatggcgatcatttgtatccccgctttctcaagtccaaaagcccattatgggctaaacggtaaaaacctgcggcagctgggccgcaggtttggggtcttaatttttgctcaggtaatggtcgatctcccagggatggatctgcacccggtaatcgtcccactcggccacctttgcatccagatagcggtaaaaaacgtgatgacccaggcacttgcgcaacagggggtcctgcttataggctgcaatggcctcatccagcccggcaggcaggttctcgataccagcggctttgcgctcatcctcggacatatcgtagatattgctgtccgtactggcggggggcatcagctcccgctcgatcccatccaggcccgcgttgatcaaaactgccagggcaagataggggttggcgctggggtcggggtttcgcacctccacacgggtacccgccttgcgggccgaagggatgcggatcagcgggctgcggttgtgggcagaccaggcgatatacaccggcgcctcatagcccggcaccaggcgcttataggagttgaccaggggattggtaatcagcgccgttccccgcgcgtgctcgagcaggcccgcgataaagtggtaggcttccttggagagctgcatcgggtcgttctcatcataaaaggcgtttttcccatccttggtcagggaaatattgacgtgcatgccgctgcccgcgatgccgaagatcggcttgggcataaaggtggcgtgcaacccgtggcgcatggccacggatttgaccaccagcttaaaggtcataatatcatcggcaatgcgcagggcggagccgtatttaaagtcgatctcatgctgcccgtgggccgcttcgtggtgggaggcctcgatctcaaagcccagttcttccagcgccaggcacatatcgcaccgggcgctttcgcccaggtcgaccgggcccaggtcgaaataccccgcgtcatcctgcgtctggaccaggggcttaccatccttatccgttaaaaagaggaaaaactccagctccggccccacctggcaggcatagcccaacttttcagcccgggccagggcgcgttttagaacattgcgcgggtcgccctcaaagggcaccccctcggtggtatatacatcgcagatcagccgggcgaccttggcccgttccgactggagcggcagcaccgcaaaggtgctaagatccggccgcagatacatatcggactcctcaatacgcacgaacccttcgatggaggagccgtcaaacatgatctggttgttgagcgccttttccaattgcttggcggggatggcgatatttttgagcgagcctaaaatatccgtgaattgcagacggataaaaccaatctcgttctcttgtaccagttttagcagcttttccttgtcaaatgtaggcatggatggcctccctcgtgataaatttaggatagagcggcgctttacaccgccttattcgcattttaattcaatttattataagcgaaaaattgggtaaaatgcaactattaagccccgcgccaggcagggcttttctttatttgcgcaattcttgccgggccagcaggcggcaaagcagcgcctcgccgccgaagccgccggccttggtaatgatccgctgcccgtcccaacggccgcccatcacccgggagagggggatctggctctcagcctcccctgtcagttcgacgccggaagcgccgccggcctccagcgcggcgcgcgtggtatcccctccaaagaggatcagggtggaagcgccgaaaagggcaggggcgatttgccgaacggcggtgaggatcaggctgctgcgccgggcgatctctgccgcgggcagccctaaagcggtgatctccgccttgctggggccggtaagatccaccgccacatcgcctgtcttcagcgcgtctgcggcagcggcggcgaggcgctgggactcgcgctgcgcctgctcttcactcaaaagcgccccctgatcggcctggagcagctgtagtgaacggcccggcgcgcgcagctgcgcctgggagagcgcagaagggctggccgacaggatggcgatatgtccgttaccaccccggtaggcgccgcagggggcagggggattttgtggttgtacgcactgggccatcagcccggcggaccccaccggcagccatcccttttcaaatgccacctttgctaagtaggcaagcgcctcgtcgctttgcgcatcaccaatgtagacctgtgcctgcgcatccccggcggatagggcggaaacggtgatgggcgcgtcctgtgtcaggatatcggcgaccgaactggtatgcagggtaaagagcgggtcctgcccaaactcggtttgatgaaggggcacgccctttaccagtaagcgcccgttttctaccgtgcggccttgagcaggcagcgcggggcacagcagcgcgccggggtaagctgccgcctctatcgcggcgagcagctcgctgcccacgtggccgcgcagggtcgaatccacctttttatagccaaggggaaaaccggcggccttcagcgccgcaacggctgtgcgtacacgctgggcagcccgcgctttttcaatgtttcggctctcggtatcaaagaccagggccgcatcccgcggggcggcagagagtccctggtcatcccagaagaccagggtgcgcacgccgcttttgcgcagcgccgcccccgcgtccagcgcgccggaaagatcgtcggccaggatgccgcagcccgggccgatcatgcccgccctccggcaaagcgtgcggccagatagagggcctcgcacaggctttcgtcgctggcggtgcccttgccggcctggtcaaaggccgtaccatgatcgaccgaaacgcggataatgggcaaccccagcgtcatattgatcccgcgtacgctggtaaaagcgccggtctttttatccatctggaaacccttgactttaacggggatatgcccctgatcgtgatacatggccacgaccatgtcgtaagctccgccgatcgccttggcaaagaccgtatccggcggcacaggcccgaccgcatggatgcccagggcattggcatcctggatggcagggataatctcgtccagttcctcgcggccaaaaagcccgttttccccggcgtgggggttcaaccccgcgacgccgatcaccggatcttcgatgcccatctgctttagcgcttcataggccagttggatggtgcgcagcacccgtgcacgggtcgcccggtcgcaggcatcgcgcagggatacatgggtggatacgtggatcacccgcaggtccccatcggccagcatcatggcaaagtcgcgcgtaccggtcaaatgcgcgtagatctcggtatggccggggaaggggatgcccgccaggtgcagtgcctccttattcagcggcgcggtgaccgtagcctgtacctggccgctttgcgccaggcgtacggccttttctacggccgtgtaggccgccaatccggctttttcctgcacctgcccccaggcgatatctccgcagttaataccgatatcgtaaacggcgatctgccgcggattgtcggccatctcttccggtcgggacacctgcaggatcggcacatccaaccccaaaacttcagccgcctgcgccaggcgcgcggggcagccgatcacaagcggacaacaaaccgccagtacactggcatccagacaggccttgatgcagatctctgggccaattccagcagggtctcccatggtgatggcgatgatcggtctattcatccttatttcctccctttagccgcggtaacggccggtcgcctcgtccagcaggggctgcgcggggccggtctgttcaatgttaccgcccgccagcgcgtgccacagcgcctcgctcacccaaaactcactgagatgcagcgtatcccggatgcggatgatccgcgcatcttgggcctgcgtagtgccgatagtgcgcagcgcccaggcaaaggcctgcgcctcgtccttggccaccaagggcaggttgccgcgggagaggaaggtgctggtcaccgtattttcataggtggccgcccagtcgatgccgtccatcagctcctgcgtacagaaatccgccaggcccatgccgatggcgttgccgtgggcgccgggcgtcaggcgggaaacggtgatgcgtttgatccggggggcggcgggctccggctggccgggaatgcccatgcggccgatgatgttagtgtcgatccccacgcccgagatatccttgcccatttggtcgatcagcaaaatatccagcgcgtccaccggcaggcggggcatgttggccttggcgatttccaaaagttccggttcccttgtggggatctcctcgggggtcagcgcttcaagcagcatggtctggtcataagcgttttccaccaaaccgatgccaaggcgcacattggccttttgcaggacctcccgggcgatctgagggatatagtcccgcaggccgtctgccccatagcggtgcacggccagcgcctgggcatgcttcccggtaccgatcacgcacatcttcatcaatccgctttcataatcgccgtgaaaatccgtatggggcttgatgcggttgatgacgaccgtgccatccgccgccaaagcatgggcgtccatgtaaaccggcatgggcagctcggaagggatgcgctcgaccttcaggctggaaacgatgggcgcgcccatggcttcctccgttacgccatagccggccagaacctcgcgctgcccctccggggtggcgttgccatggctgcccatcgccgggaagataaagggctgggcgcccttggcgcgcacgaaatcgcagaccgcgcgggttactttggcgatattggccaccccgcggctgcccacggcgatggcgatcttctcgccgggatgaacccaatctcctttggcggccaaagcctttgcagcggcttcggagatgttatcgatatgctgggcgttaaactgctggcgtaccggcaccatattggggttgaacatgtgcataagcctccttatacggtattgatatagacgcatgtagaaactaaaggacgtttttaaatagccacaagctcattctagcgcaggccctgcgggaattcaataaagaaaacgcccggaggccttaggcccgggcgtttggctattgggtcaggtgagcatcgcggccaggctgcccagcagcgtgggcatgagggtaaagaccatgaccacgcggatggtgtgcagcatggccacccgcggcaggtcgcattccaggtcctcggcaaagacgatcatttccgtcaacccgcccggcgcgcaggacatgatggaggagataaagttcatcccgcaaaagcggtacatgatcagcccgatggccagcgaacagaggatcatcccgaccaccatcacaagcgtggggagcaggagctgccccagcgttgccaccatatccggccccatgcgggccccgacaaaggcgccggcacagatctgtacgattacccgggctgggtttgggaagcgcagccgcccggtaaaggtgttaaaggccgcggtggcaaacatggcgccgatcaatgcaccagcagaaatgccgctccacagccccagcagcgcgccggcgatcgcgatggaaaaggtcaggatatagccggcgtaccgcgttttagcgggttcctccggcgcaggggcggccggttcttcctccttaaatacctcctgctcctgctgcgcggccttaccggcctttttagccttgagctgacggtaggggaggtttagcccctttttgccgatgatactaaagagcaccggataaaccgccagcagagagagcaggcgcaccgcctgcataaagccgaccttggccgtatcggcccccagttcgtcagcgatcagggcaatgtccgtaacgccgcccgggcagctggcaaaaagtgcggtcgcaaaatcgatgccgccgatatagtgaacgatgataccgatgacgatgttaagcgcgatcatcccagccaccaggatcagcgcaggcaacagcagcgtcttcatcccgatcacatcgcttttggtgatgcggtaccctaccagcgcgccggacagggtctgcaaaaccggacggaactcggtggggaccacgccgtaccctgtcgtcaggttaaagatgatgaccgcgaccatagagcccagtatggcgcccgccggcaatttgaatttgcgggccagcagcccgcccaccgtggctacggccagcgtacagataaaagatagtgttggggacatggatcatgcgcctcgcttttaatgaacatctggatgcaaaaacaaaaatgtgaacaattggtagagtaacatgcttttgtcctggatgcaaccgtgtaaaggctaaatagggacaagaatgaaattgtgctgcccaccacttgcagaattggcaaaaacgttataatataaatagcggacagcctttataaacatcattttaaaaggctgttcgaaggaaagctcaagtgtttgtaggacagtaggaaaatttgaggaggatatcatgcgttacaaaaagatcccgaatactgacatgaacatttcgtcgattacggtgggcacctgggccatcggcgccgatggctggggcgacgtgaataccaaggattccatcgaagccatccacgccatggtggataatggcgttaactttatcgataccgctccgatctatggctttggccactctgaggaggtcgtcggtcaggcgatcaagggcctgcgcgacaaggtgttgattgcgacaaagtttggctctacctggcctaacggcgtgaatgctccctccgcgcgcaacaacggccgagagaacatcatgaaagaggtggacgattccctgcgccgtttggggatcgactgcatcgatctgtatatcgcccactggccggattttgagcattccatcgaggagatgatgggcgcgttgaccgatctgcaaaaagccggcaagatccgctacatcggcctttccaaccatgacgaggccatgatggaagaagccaacaagtatggccaggtggccatggcgcagctgccctattccatggtcaaccgcacggcggaagagaccatgcagtgggtggtggaccatggcatggcgaccatgacctatgggtctcttggcgccggcatcctgaccggtaccatccgcgagatccccaagtttgacgagaaggaccgccgcgcgaccttctatcacgattacttctccgagcccatgttctccaggaccatgaagctgctggagacgctggatgatattgccgcggcccacggcaacgtaccggtagcgcaggtagcggtcaactggtctacccagcatccgctggtatctaccgcgatcatgggcgtgcgcaacgtggccgaggccaacgagaactgtgcggccatgagctggtcgctcagcgacgaggagtttgcgcgcattaataaggccatcgaggagacggtgggccagggtgcacacgtcaagcgtcagtctaaaaaataagatcgattggtaaggatgagagcgccggatgaccggcgctcttttcttttccttttaaagatttgccttaaatccccgcttcgctgctttcatattccctcctggccctgcataaccctgaatcagggcattatgtatggagaggggacggatttgagtatgaaagattacatagaggaaagggtcatcaaaactgcggagtatatcgtggagaacggcgctaccgtgcgcgcggctgctaaagtgtttggtaccagtaagagcaccacgcataaagacctgatcgaacggctgccccacatcaaccgggaactctctgcgcaggtcaaccatatcctggccgtgaacaaggccgagcggcatatccgcggcgggcaggctacttgccttaaataccagcagcagagattgttacataaagtttaaaacccctctcttgcattgtaggggtgaagttggtaaaatggtaaagaaattgagaaacaggagtttttcctgtttctttatttgagatttatgggacaggcccccgtgaaggcaggcgggccggttttgtaatgtgtaagatatttgaaatgtgcgcatgataaaagggcccggtgcagccgggcgtgcagaatttgtcgatggaataaagggttgaggtgctttatggcgaaaaaagtaatcaagtccaagcggcgaaaatggatccgtgcgctttggaccgtggtgtgcgttgaactgatagcggtcgtctgcctgggcgtttatggttttgataccttcgccaaggcgtggaaggatcccagcagccagttccaggccaatgcggatgcaacgccgccaccgctggtagttacggatgatgcgggcgaagtgaccaacgagtataaatacgatgaggacgtggtcggcatcgtgctgatcggcgtcgatatcattgagggacgctccattaacgaggtcggctataataccgatacgatgatggtagcggcgatcaatacaaagacgaatgaggtgacgctgatctcgctgccgcgcgatacgaaggccaccttcccggtacttaataagagcggggagcagacccgtaccaagaccggcaagctcaatgcggcctttgcctatggcggcgggccggatgggcatggatatgaaaataccgtttcggccgtcaataatttgctggggaccagcctgacgtattatatggcgattgatatgaacggcgtaccgcccatcgtcaatgccgtgggcggcgtgccgatcaccctggatgcggatttcagtgcgattgatccgacgatgaccaagggcaagaccatgaccttaaacggcgaccaggcattgacctactgccgcgagcgcaagctcaaaggcatggacggcagcgatatctcccgtacgggccggcagcgcaactttgtaaaggcttttgcagaggtgctgatgaccaagaatccggtcagctacatccctcagctttacggcgaggtgcaaaaatatacccacacgaatctgacgttgccccagatcactgcgttggcaaagatcttcagcaacttggatatcgacaacatgcgccttgagatcgccgaaggcagcacgtctaacggatactgggtcgtagacaaaaacaagatgcacgatctggtggcagaagtcttctatgtagaataaagcaaaaaacataaataaatccctctgcctttcgcgacagagggattttgcaatctaagctaactttggttaggcttcgtccatgccggggatgcgtccttcgcgtatcccatcccacaggttatactgcggggtattggcaatggctccggctacgaatttgcgcgcgtcaggaaaagtaccttcgaggtttagcagataatcctttaccgtctggcgctgggtattgccgttggccgggcaggggttgtggatcaccggcaggtccagcttacggcatacgctttgaatatgccgctcgggcaggtagaccatggggcggatcagcgtaagccctgagcgggaaagataggtcacgggcgtgaaggtgttcaaacgtccctcgtgaaacaggctgagaaaaaaggtctcgatcacgtcgtcctgatggtgtcccagggcaaccttgttgcagcccagtgcaaccgccttttcgtataaaatgccccggcgcatggttgcgcacaacgaacaggggtttttctcctgtcgctcttcaaagatgatggggccgattcgcgtgggaatgacggtgtaagggatggatagggcatcgcaaagcgcggccactccggaagtatcaaagggttccagacccatggtcagggtgatggcgtgcagctcatatggcgtttttgaaaaacgcttgtaaagggagagcgcttgcaacaacagcaacgagtctttaccgccggatacgcctacggcgattttatcgccgggggcgatgaggtggaaatcctgatctgcacggcgtatgcagcctaaaacttttttcatacgggcctccttggtgcaaaatacgcttgcatcagtatagcgcatgcgccaaagcgtggcaagcacggcccgaataaattctataggagatcattatgactgaagccattacactctggtttgaaaatttatttgtaggctttccaccctggatcgcggtatttgtactgagtatggtaccggtcatcgagcttaaaggcgcgatccccatcggcgtagctgcgggtatgcccttatgggaggcattttcatttgcggtgatcggctctacgctgccagcgtttctgatcattcttctgatccgcccggtgctcaaatggatgaagacgacgaaatatttccgcaaatttgcccactggctggagcgtcgctcgcaaaaaaagagcaagaacatccaaaagtacaagctctggggattattccttttcgtagccataccgctgccgactaccggagtgtggatgggctcgttgatcgctgcgctgatggatatccgcttgcgcagcgccgtgcctatcatttttctgggcaatctggtagctggcgggctgattctgctgctcagccacggcatctttggatgagcggcgcgaacgttgacggatgatgttatatatggtagaatacatacgaaaaattaatattcgtccttatccagagcggcggagggaatgggcccgatgaaacccggcaaccggtttataacaaacaaggtgctaaatcccacagcatggcgatgctgaaagatgaggatgtcgttcataaacaaacggcctccccaaagcgggaggttttttgatggaatggactccataagggcgaatgcttttaagaaggagtggcgaatatggcaaaacgtttttttaccagtgaatctgtaacggaggggcatcccgataagctgtgcgaccaggtatccgatgcgatcttggacgcgatcctggagcaggaccccgtcgcacgggtcgcctgtgaaacggcggcgaccacgggcatggtgctggtgatgggcgagatcacgaccagcgcgcagatcaatatcccggacattgtgcgtcaggtggtgtgcgatatcggctatgaccgggccaaatacggttttgatggcaatacatgctcggtaatggtcgcgctggaccgccagagcggcgatatcgccatgggcgtgaacaacgctttggagacccgggaaggcgatggttgcgatatcggcgcgggagatcaggggatgatgttcggctatgcctgtgacgaaacgccggagctgatgccgctgcccatcgctttggcccataggctcagccggcggttgacccaggtgcgccgggaggacatcgtgccccacctgcggccggatggcaaaagccaggtaacggtggagtacgaaggggacaagcccatgcgagtggatacagtggtagtttctacccagcatggtgagcagatcactcaggccgaactgcgggagatgatcatcgaacgggtgattaagcccgtcatcccggcggatatgctggatgagaataccaagttcctggtcaaccccacggggcagttcatcatcggcggcccgcagggagattcgggactgacggggagaaagatcatcgttgacacctacggtggttacgcaccccatggcggcggcgccttctcgggcaaagatcccaccaaagtggaccgctctgctgcttatgcggcccgctatgtggctaaaaatgtggtggcggcgggtctggccaggcgttgcgagttggagcttgcctatgccatcggcgtggcacggccggtatcggtcatggtggatacggatggcaccggcgctttgccggatgaactgctggccaagatcatcggcgaggtgtttgacttaaggccggctgcgatcatcgaaaagctggatctccgcaagcctatctaccgccaggttgcggcctatggccatatgggcagaacggatttggacctgagctgggagcggacggaccgggtggaagccctcaaagctgccgcacaaaaatatttgggttaaacgatatagggcgatagcccgccgccgccttgcgcagttgcgtaaaagcggggcgggctattataatatgaacatgaagttaaagggataaggtggcgcgtgcatggctgaacttgagggcatggtggcggagatcgtctaccgaaatgaggataacggctttaccgtaatggaggtggcctgcgggcaggagtccgttacggcggtgggaagcattgcctttctccaacaaggggagcaggtgcacctctggggcgactgggtggagcacccggagtatggccgccagctgaaggtgacgcgctatgaggctgtgctgcccagtacagaggagggtatcaagcgctatctggcctcgggacagatcgatgggatcggcccggcaacggcggaggctattgtacaaaagtttggtatggataccctgcagatcatgcaatttgccccccagcggctgatggaggtcagcggtatcggcaaggtcaagtgcgcgcagatcgccgagagctttgcccaaagccaggaggccaggggcgttttggtgtttttgcagagctatggcgtcagcgcgctgtttgcccagcggatctataagacctatggcgtgggcgcggtggagatgatccgccagaacccttaccggctggtacaggatatcgagggcattggctttaagtcggccgatcgcatcgccctgtcgatggggatcgaggcggacaatcccttccgcctgcaggcgggcataacctatatcctaagcgcggaagcgggggagaacgggcacgtgtacctgcccgctgagtgggcgcagcagcgcgccgccgcactgctgcaggtggacctggcgctggtggagaatgcctttatgcagctggtcatttccggcaacattatattagaagatgttgcgggcgaacaggctgcctacctgcccgcgctctacaccgcggagagtgaaacggcccagcggctctgggatttggcgcaaggggatggacaagcgcccctgatggagatggacaggctggaggaggaattgcagcgtctggagtgcgagcagggctttgcgtttgcgccggcgcaaaaagaggcagtggcgctttgtctgcgccaccgggtggcggtaattaccggcggcccgggcacgggcaagaccacgattatccgcagcatcgtcaatttgctggaaggcttatcctttgaggtggcgctggctgcgcctacaggccgggcggccaaacggatgagcgaggctacgggacacgaggccagtaccctgcatcgattgctggagtacggccagggtggcggggaggaagggttccagcgcaacgaggatatgccgctggagcaggatgtgctgatcgtagatgaagtttccatgatggatatttctctggcataccggctgatgcgcgccttgccccaaggcagccgtctgattctggtgggggacgttgaccagttgccctccgttggcccgggtaattttctgcgggatgtgctgcagtgcggcaggatccccagcatccggctgcacgacatctaccgccaggacgatagcagcatgattgtcatcaacgcccaccgcatcaacgagggcgaaatgccccagtttaacgcgccagagggcgggttttttatcgagcggcgcggcgatatggccgaggcggtggcttcagtagtggcgttgaataccacgcgcattcccaaacactttggttttgatccgctgcgccaggtacaggtgcttacgcctatgcgaaagggcgtagcgggtacgatcaacctaaacgcccgcctgcaggaagcgctcaatcctccagctcctggtaaggccgagcgcagggccggaggacagatcttgcgcgtgggggataagatcatgcagatcaaaaacaattatcagctcgaatgggtgcgcgctggcgcaggcggccagggcattgagcatggcgagggcgtgttcaatggcgacatgggggaactggtggcgctggacgacgatgaactactggccaccgtccgctttgacgacgagcgcgtggcgctttacgaatataaccagctggacgagctggaactggcctacgccatctctgtgcacaaatcccagggcagcgaatttccggcggtgatactgccactggtggccacgaccccattgctgatgacccgcaatttgctctataccgcagtgacccgagcgcgggagttggtggtaatcgttggccgcgagtgggtggtaggcaatatgatcgggaacaaccgcatcgtacagcgctactccggcctgctgccccggttgaaccggttatatgaggaactgccatgagcatgaacgaattacgtacagccctgcgtcagggcggagaggcgtttttggacctgctctttcccgaggatgggctgtgcatccattgccatgatgaaagggctgcagaacaggggctgtgcctggcgtgcgcgcaacatctctttccttccgcgccgccgaagtgtgaaaggtgcggcaggcctttgcaaaatgagggacccctatgcggcacctgccaaaagagcttaccgccctttgcgggcgctgtagctccctttctatatcgggggctggcgggcgagatggtgcgggagatgaagtatcacgagaaaaagcgttacgccaattttttgggcgatgccatggcgcgttgcctgcaggcgttggaggggcctaggccggacgtgctggtcccggtaccgctgcaccgcagccgtatgcgtgagcgcggatataaccaagcccaatggctggctgccagggtaagtctacactgcggcgcgccggtgctgtccaatgcattgtcccgtgtgcgggagacggacagacagacccatctggaaactcgggcaagggagaaaaatgtgcacgacgcctttgctgtgcataaatcccgcgctattcgcggcaaaagggtattgctgattgacgatgtgctgaccacgggagcgacggcgcgcaactgcgccagggctttgctggcgggcggggctgcacaggtttgggttttgacggccactacggtcgcctggcgcccggatacgggcaggctggaggactgggaggaagcctgaaaaagatttttattgctttttgcaaactttgagtgtatactaagtccaatggttacaatttaacgtgtctgtggttgaaagtcgatgccagtcgcaggcgaaacgatccacgtaagtcgggcaaagtcccggtgagcatggtgcggcttagaagtaagtccgtccagaagtcattctgagaaaagtagtagtgggggggccgatgccctagtagcgaacctttcaggcggcgagtgtggggtcaaagaccaggtcaggcgaagaattgtacctaaattattttcattttgcggggggattacttccatgtttcaggacaaaacgttaatttgcaaggactgtggcgctgaatttgttttcaccgccggtgaacaagagttctacgcggagaagggtttccagaatgagcccgttcgttgcaagagctgccgtgatgctcgcaagaatgcgcgcaactcccggccgcgggaaatgtatgagaccgtgtgtgccgcctgtggcgcgcccacccaggttcccttcattcccaagaatgacaagccgatctattgtgacgcctgcttccaggctcgccgctaatccccaacgcaaagtaagacttttcgttacaggataatgtattggcaaatccccagggcatacgccctggggatttttctatttgtccagcaccgcagatggagaaaagggcgcgcgatggaggatatatcctgcatgataatcctgcaaaatgggtatacaaagaaagaacgtatttcttttgcaaaacgccaaataattccttcaatttgcactagcgttgcatttattcgagggacggatatggaaaatttatacacagataaaaaacccaaaaaccggattatgcacagatttatccacattatccacaggctctaaaagacatttgggatgcgacccctgcagaagaagatgtaaaatatttgcaagtttaggacactacccctttcatgccctataagttttaaaagaaagttaacaccttgttcttaaattcaggcagggtttagactaaaacaatcgaatatattaaataacaacgctaagttctgagaggaggaactcaagatgcgtacaatgttaacagggaaaaacatgacggtgtccgatgcgctgaaagggcgcctggacaaaaagctccacaagcttgaccgctattttgatcaggatgacgtgatcgcccacgcggtcatgtcggtggaaaagaaccgccacattcttgagataaccatcccctatgaagggatcgtgctgcgggctcaggccgccaacgaagatatgttcagctctatcgacgaggcggccgataagctggaccggcagatccgccgccagcgtactcgcattgaaaaacgtatgcgctcgggcgctttccgctttgacgcgcaggatgaggtgctggaaacagagccgatgttggttcggaccaagcgctttgccgtcaaacccatggatgtggaagaggccatgatgcagatggatctgctgggacacgactttttcgtcttctccaacgccgactcgggcgaggtaaatgtgctttataaacgccgtgatgggaattacgggctgatcgaaccggattacgcggcggatgatgaggcggaataacacgaaaaaaggtgaatatcgtacgttttggcgcccctggtgatagccgggggcgcccttttgggttgatcatgccgcatgcttgcagggcggagataataatgataaaataagcccaggctattgccatagaagaaaggaattaccagatatggattggtttagaaagctgctgggcggcagcaatgacaaagagattaaaaagctgaaccggatcgttgagcaggtcgacgcttttgagccgcagatgaaggccaaaacggacagcgaactgcgggatatgacccgctctttcaaagcgcgcctgggcgcgggagaagggttggacgacctgctgcccgaggcttttgccgtggttcgggaggcggccgtacgcacggtgggcatgcggcatttcggcgtgcagctgatcggcggtatcgtattgcatcaaggccgcatcgctgagatgcgtaccggtgagggtaagacgctggtggccaccctgccggcctatttaaacgctctggagggcaagggcgtgcatatcgtcacggtcaacgattacctggcgcgctatcacagcgagtggatgggcaagatcttccgctttttggggatgagcgtggggctgatcacccacgatatggagccggcccagcgccagcaggcgtacgcggcggacatcacctacggtaccaataatgagtttggttttgactacctgcgggataacatggtcatccgcaaggaaaacatggtgcagcgggaactgcatttcgccatcgtggacgaggtagactccatcctcatcgatgaagcgcgcacgccgctgatcatctccggccagggagataagtctaccgagatgtacacgctggtggaccggttcgtggctcggctaaaaaacgtgcaggactataccgtggatgagaaactgcgtaccgtcaacctgaccgacgagggcgtgtccaaggcggagcagcaattcaatgtagaaaacctttcggatatcgccaatacggagctgaaccaccatatcaaccaggctttgaaggcgcatgccattatgaagcgggataaggattatgtggtgcaaaacggcgaagtcatcatcgtagatgagtttaccggccgtttgatgaccgggcggcgctacagcgaggggctgcaccaggccattgaggccaaagagcatgtaacggtggcgagagagagtaagacgctggccaccatcaccttccagaattactttagaatgtaccagaaactctccggtatgacgggtaccgccaagactgaggaagaggagttccggggcatttacgggctggatgtcgtgaccatccccaccaataagcctatgatccgcgaggatctgaacgatgtgatctataccacgaaaaaaggcaagtataacgccgtgatcgcggccatccaggagaagcatgcgaccggtcagccggtgctggtgggtacggtttcggtagaggtctccgaactgctcagcgaaatgctcaagcgcaagggcgtgccccatacagtacttaacgccaaataccacgccaaagaggcggagatcgtcgcccaggctggacaggtgggcgcggtcaccatcgccaccaacatggccggccgcggtaccgatattcttctgggcggcaaccccgagtttttgacccggcaggaaatgcgtcagatggattttgaggatcacctgatcgaggaggccatggggcataacgatacggatgatgaggaagtgctcaacgcgcgcaaagtctataatgaactgatcgccaagcataagaaggttaccgacgaggagcataaaaaagttgtcgcctgtggcggcctgcatatcatcggtaccgagcgccatgagagccggcgtatcgacaatcagctgcgcggccgtgccggccggcagggcgatccgggttcttcccgcttttatatcgcgctggaagacgacatcatgcgcttattcggctcggagaagatcatgcccatggtggaaaagctgggcgtggaagagaatcagcccattgagtacgggctgctgagcaagcagatcgaatcggcccagaaacgggtggaggccaataactttgatacccgtaagcacgtgttgcaatatgacgatgtgatgaaccagcagcgcgaggtgatctatggccagcggcgcaaggtgctgatgggggagaatatcaaagattccatgctggagatgctggatcagctgatttcggatgtggtggacgtctactgcaccgatgcggaatgggagctagagcccatgcgcgcacattttgagcgggtgttcctgccccgaggggccagcctggagttgcccgaggacgcgcaggaccgcatgactaaagaagaactggtagaaaagatccagaagctggctcggcattactatgagttaaaagaagcggatattaccgagcatggcgtggacatgcgcgagctcgagcgcgtggtgctgctgcgtgtagtcgatcaaaagtggatggatcacatcgacgcgatggatcagctgcgccagggcatcggcctgcgcgccatcggccagcgcgacccggtggtggagtataagttcgagggttacgatatgttcgagcagatgatcgcctccatacgggaggatgcgatctccatgctctttagggtcaacgtggagcgggtgccccagcgcgagcaggtggcaaagcccacggtggcctcccacggggatgatgaacctgcggccaagcagcctgccaagacggacaaaaaagtgggccgcaacgatccgtgcccctgcggcagcggtaaaaaatacaagcattgccacggccgtaacctttaaaagcgccgggtaatttgcatttgggagttgagaaaatatgattctggaattggataatgaccggcaggagctagtcaagatcaggcagatgattaaagaggcaggtgactcactttgacctggcccagatagaggcgcagctggagaagctggaagggcagatgaccgcggacggcttttgggacgacgtggagcatgccaataaggtctctcagcaggtcaaaggcttaaaggatgatgtggccgcctacaggtccctggtggcggcggcggacgatatcgagaccatgatcgagctttcggatgaggagcaggatgcctccatgctggaggagatcacctctgaaatgcagaccctgcgcgagcgggtggaaaagatgcagctgcaggcgctgctctccggcagctatgacgccaatgacgcgattttgtccctgcacgcgggcgcgggcgggacggaagcgcaggactggtgcagcatgctgtttcgtatgtacacccgctattgcgagcgcaagggttacacggtcaaggtgttggatatgctggacggggatgaggccggcatcaagagcgtgacgatggagatacagggccgttacgcttacggctatttaaaggcggaaaaaggtgtgcaccgtctggtacgcatctcgccttttgactcttctgcccggcggcatacctcctttgcctcgctggatgtttctccggtgatcgaggcgaatgagggggatatcgagatcaaccccgaggatctaaaggtggatacctaccgctcctccggcgcgggcggccagcacgtcaataagaccgagtcggccatccgtatcacccatatccccacgggtatcgtggtggcctgccagaacgagcgcagccagatccagaaccgggagacggccatgcgcatgctgcgctccaaactgatggagctgcgcgagcgcgagcggatggagcagatggccgagatcaagggcgagatgaagaagatcgaatggggcagccagatccgctcttacgtcttccagccctataccatggtgaaagaccaccgcacgggcgccgaggtgggcaatgtggacgcggtgatggatggggagctggatatatttatccaaagctacctcaagatgctgtaatgcggcaaggattgacgggggaaccgtaaaaaagtataatgtagcaagtgtttgctatatgcctatcgctcttttgggcgggctattttgcggcggggcttttttccgccgcctcgaaagaggatgcctcatgacggttgaaaatgctgaagaacggcgcaggctgttgcaggaaaggcggcagttcgcgctggaatatagcaaagagcgcaaacggccatatgataaggtcaagcgggtatgcgatattatcgggtcttttgtgttgctgattttctttgttatcgttctgcccatcttcgcgctgtgcattaaactggattcgcgcggcccggtctttttcgtgcaggaacgggtgggcaaggatatgcgcctgttccgcatgtacaagttccgcaccatggtgtatgacgccgagcagcgtgcggcggaagtaaagcagagcaaggattgtaaaaacgagtttatccagcatgagaacgacccgcgagtcacccgggtaggcgcggtgttgcgccggtttagcctggatgagctgccacagttgttcaatatcattaaaggagagatgagcctggtggggccgcgcccgttcatcatcgaagaaacgctgatgtgcaggccggagcacctgcgccgccataccgtgcgccccgggatgagcggctatgcacaggtaaacggacgcaatgatttgaccctggaagaaagaatggaaaaggacctttattatgtggaccatatgggtttttggatggatgtgggtatcatgataaagactttctttgcgatcttctccaaaaaaggagcctattaggttcgcgtaaaagaggcgcatttgatcatgcataagttaaaaaccatcttagcagggctgctttgcgtcctgctgattacagctggctgccagaccgtacaacaggaaccgtcggcctctccttccccagaggcgaccccggagatcgtgttggaacccaaggtgacccagacgccggagccgacggtagaaccgcttaacctgtctactacgacggggctgccgaccacgcttgactaccgcccggtcgaggtgatggtggagaattcgccagaagcgcgtcctcagtccggctttaatcaggcggatgtgatctatgaggcctatgtagaagggcagatcacccggttcatgctggtgtatgcgacccagcttccgcccgaaaaggtggggccggtgcgcagcgcgcgcatctattacctggacctggcacaggaatgggacggtatctacacccattttggcggagctaacgaccccaatgcctccaacgtctataagaagtttaagcagatcaccctgcgcgggcatttagatggcatgacggagaagaattatttctggcgggattcctcgcgaaagagcccgcataacgcctatgtcaatatcagtgaggtgacgaacctgtacggaaatggcgtaaagatgccgcagacgccgcggcagtttgccaatttccgcggggggagcgatgcgcctttggcgggcgagagcgtacagaccttaacgctgccctacagctcgtttaacaaggtcatctacacttataatgcggataccgggctttacagccgcgccatcggcaataagccctttaccgataaggaaaccggcaagcagtgcactgcggccaatatcatcgtgcagtatgccaagcatggcagctataacgataaggccgggcacatcagcatcggccttgtgggttcgggcaatgcggaatattattgcgatggcgtgatgcgcaagggcacctgggaaaagaccagtgaaacggcccagacagtgtttaaggatgaggggggcaacgtcatcaccctggcaccgggcaatacctatgtgcagatcgtacccaccaattttaaggtgacccgcggctgatgcggagaacataaaaaagccccaaggggctttttttataaacggggaggaagggccggatgtggatcgacgccactgtgccgatggtaaacggcatgccggtttggccgggcgatgagccgttttgtatggcgattgaacaaaccgcgcaggtagccggtgcggtatccactcaaagccgttttgggcagggcacgcattgcggtacgcatatcgacgcgccctttcactacgatcctgccggcgcgcgggtagacgcgtttgacgcgcaggtgctggtgggcccggcttacgttttggaccttaccggtcagcttacgggacatatccgcgtgcaggatgtgcagggccggttcccggaaggatgcaaacggttgctgatcaaaacggataattctaaatggctggggtctggtggctttcgcaacgactttatcgcgctggagcccgaagcggccgcctaccttgcgcggcaagatatccagcttttagggatagacgctttttccatcgggccgattgggtcggtaggagatcagacccaccgcgcatttttaaaaggccgcctggctgtggcgctggaaaccgtgccgctgcgggaggtgcgttctggggcgatacaactgatctgtgcgccgataaagctggcggggactgaggccgcgcctgcgcgcgtgtggatctggcaggaggagggataggcttggagatcttgaagaagataggacctgccctgttgggctgtgtgtttgtgctctcctggttgttgatcgtactgcttacatctgtggaatggacggcttttgaccggaacttttatgcggatcaatatcaaaagggcgggcaggccgcgtccatcggcatcagcgaagaggcgctgatggaggtgaccgacgggttgctggaatacctgcgtggggagcgggaggcgctggacatgcaggcggagatcatgggcgaggtgcgcccggtctttaacgagcgggaatgcgcccatatggtcgatgtgcaggtgctctttgtcaatggcttccgcttaagatggatcgccctggcggtggccgcaggaagtctggcggcgctcattgcgttgcggcggaaaaaggcgataccgatcttgggccggtgctgcttttgggctaccgtggcgctgggggcgctgctggccgctttgggaattgcgctggccatcgactttaacggtgtgtttacccagttccatctgctgtttttcaataatgatctgtggatactggacccgcgcacggatattctgattcagatggtgccccaagccttttttgtggcgacggctacccgcattgtgatcacgctggccatcggtcttgtggtgactgcggcgctgggattttgggccatgcgcgctaaagtatttcgtaaagaggttaaataaagtatgagttatatggagcgggcgcgcagaaagctgccggccattatgcaaaaagaagacgtgaacatcttggcgctggagtcctcctgtgatgagacggcggctgctgtcattcaaaatgggcgcacgatcctgagcaatgtgatcgacagccagatcgcgctgcaccagccctatggcggtgtggtgccggagatcgcctcccgccagcacgtgctctccatggagcgggtgatcgcggcggcgctgcaggaagcggggttgggttttgatgggctggacgcggtttcggttgcttatgggccgggactggtgggggctttgctggtatccgtttcggcggcaaaggccatcgcctttgcgcacgacctgccgctgatcggcgtgcaccacattgaagggcatatcagcgccaactatctggctcatcccgacctgagcgcgccctttgtctgcctggtggcctcgggcggacacagtcacttggtgaaggtaactaagggcggtatccttacgctgggcgccacgcgggacgacgccgtgggcgaggcttttgacaaggtcgcccgggcgctgggattaggttatcccggtgggccgctgatcgataagatcgccaaagaaggcaatccggatgcctttcactttccccgggttatgatggaagaggataacgacgactttagctttagcgggctgaaaacagcggtcatcaattttttgcataacctgagccaaaaaggcgagcagccggatgtggccgacctggcggcctccttccaaaaggctgcggtagaggtgctggttgccaagaccatccgcgtggcaaaacgcgaggggatcgggaccgtggcgttggcaggcggtgtggccagcaactcccttttgcgcgaaacgctggaacaaaaggctcgggtcaatggcctgcgcgcggtttatccgccgccggtgctgtgcaccgataatgcggccatgggtggctgcgcagcgtacccgcacctgatgcggggagaacttatggatatgacgctcaacgccgtgccggatctgcaattagccgaacggctaggcagtgcctaacgcgtgcgcaaggtggtgtgcgatagagcagacactgtacggccggttatagagcctggtaaaaggcggggttgattcgcagcaagagttacattggcttaattattagatttgcgctgcgttaaaaccgtctatttacaacaggatcattcgttttcgtcaaatcataaggcatccaaggcattgggtgccttttgttgtaaatatctaatgcattcgtacggttgaatcatggcgacaaaaatattattgttacattaaattttcctttctgctaaaaatcaatggggggaagtatagatgactgataaaaagattgcccttatcgtcacggcggctacagttctaggggtactgcttatcatgctttctatttggacgcttttaaggattgcttcttctcaggcaaacggtaacgaaacattgctggagacttccgcctcaccggggggagagataatgctggaagcgtataggactgagcctggtgctacggtggatttctccataaaggtataccggattatgggtaaagaaaagcaattgatctataatgcgtatcatgaagacgaagtatcaatggaatgggtcgctgttaatgtggtactaattaatgaaaagcggcttgatttatctaagggggaaacttacgattggcggaaaaattgataaatctgttgctgggcgggaaaaggtcaagacgccagatagtggcatgaacaagtcatgaaaagggaattgtttctttcagcatgatggggatagtaaagaactcgtggtatgctggaatttcagttctatggggcgggtgttgctgcaaatagagtgttatataatagagcctccggctactgcaaaataatcctggttatgaaatttgcacctgcgcgtactggcaataccaacacagggaggtaactaatttgatttataattctattagatatatttttttggtccttcttttggccggagttttaatctggctcattagatcaaggttaataaagaggcgatttctctcaatgctcattatccttgcggcgttaggggttagtacgctagtaatgatgtttcctgtagaaaactatttcgtgacatttgaatctcccacaagtgcatttaactacgtacatgcagacgaaaacgtagatattgttgatatagttgatggcaaaaagtccagcatgatcgtatatttgaaggatggagcctattctgacatgtatgttctacgggctgaagatggatataaactcgtggaaccaactcctgggaacatcttagaacttgaatcacgaggcgagaatcggaacctgttcttcaataatgcaacgggaacgcatgagtacttttttatgaacacggtttgctttaatggagaacccgaaatctcggatagcaatggtacgcaatttactatcgtgccagtcacgctcggatcgcataccagctacatcgtttatggctatgtaggggaagtagatgcaaattactatctcacaattagcagtgagaatatcggcgtgaagtgattattgtgaatggattgatcactcatttttagtaggatgggattcaaataccgatcaaattgcggaattgatgttatgtttgcattagaagcggtgacggtacttatgggcgaggtggctatgtgtccgctccagcgccagtccctatccctgtcctagtttattaaataaggtggtaaagaaatgtatacacttattagaacactaatttggatggttatagttgcactagcagtttttgcactttgtatattttttcgaaagaaaaatccggataaaagattgaggcaaatatccattgtctttacggtgatattttgttttaccataagtggtattatggcgatgattcctcttgagaattcccttataacttttactacacctgaagcggtttttaattatatgtatccagagagggtaatgaaggatattgtgtatgggaaagagtcatgtatgattattagtaatgaggttgggaaggaggataatccggagttcctagttgtaaaaggatcaggtaatgattataagattgggattgggggagtaggaggagcgactcaatctatagaagtaaaaacaaaccgttcttcgggagtgcgcacacatatatttcgtgctaccgataccgatgattattatttgtttgcattcctttattctgaaaagggagaaccaagctttagtgacgagtcaaattcagaatttaccataatacctattaacgaggctaatgcagcgatctatggatttcatcaatatctagcatatggatatatttctgatgtaaacagtgactatcgattattgctcggagaagatacaagaattgcgacatattgagaataggtgaaatgtatctgactggatactaggaggcgatttaattgatataccatttggtgataatgctgagtattgtgctaattgtaatctgtgttgcggctattcgatatagttttgctacgcctgctcgtaaaaaggttacagctatagctatatccagcggattgctggggctggttgtatatttttcggcgattccgtacttcaacttagttacgcattttaaaacaccggaagaagtatttaaatttatatcatttgaaccggtacaatatcgtgtggacgggaaagaatccagtatgcttatatactacgataaggatgcatatacagaggtgttggttcgtaaatgtggagatgaatataaacttacaagacagaacgaaagatatacgaacgtttactttgaagagaaagggccctatattggaatgaatttgtttggagcaaaagggtctaatgaattctatttttgcagtggtgttatgtttgacacggataatatttccgtatctgatagcaaagggtcagattttcaaatagtgtcagttggaatggatgatattcgtgcgtactttgtatacggctatgtaggcgaaattacctcagactactatataatgtttggagatgaaaaattaaggttggcacagtaaacgaatatgtctttttaactactaataattagtgggagtaaagccgggagaaaagccctggctttactattaactagaactaaatgaccattttttcaactgttatttccaaaatcacatccaatggtctcccattcagatgaggctgtgtttagagaacgttctccggatccaggctttagaatttttactgtgatcgcacgaccaataaatacctttgctttaccttactaagcgcctgccatagcgcaatgcctatcggaatagattcccgattatccagatggaacatacgtaatgaaaaagattttaataaagtagcaaaacataaccataatcatgtataatagaacgagcgcataaaagcacactttgtttggtatacgcaaaaaatagtgtgccatcgtgtcaaaccctgggttagatgtgaatagggtagaaagagcctatttgcattggagggggattggcatgggaaagcggttaacaaaaaaagcctttatcgcgctgggcctcagcgtttttctactggcggtaacggcggtatccatcgccttatccgatagcgcccgcagcgctatcggcttaaatttgggcaagaccattgtactggatgcgggtcatggcggttttgacggtggagctgtggggatcgacggtgtggtggaagcgcagctcaatctccagatcgccctgaaggtgcaggctaaatttgaaagcgcgggctggaaagtcgtacagacccggacggtggacgaaggcctgggcggggacggcaagggaaccgataagcaaaaggatatgcgcgcccgagcgcagatcattaaggatacaaagccggacgtcatggtttccatccatatgaataagtacacctcggcctcggtacgcgggccgcaggtgttttaccaaagcggcgctgcagagggcggcgctgcgctagcccagtgcatacaggaccggttgaacgctttgatccccgacgggtggaaaaagcgcgaggtcaaatcgggtgatttttacgtattaaaggcgggcgagcaaccttcggttattgttgaatgcggctttatatccaacccggatgaaaaggccatgcttcaagatgaacagtaccaggatcgggtcgccgaggcgatttttaagggtgtgctggactcctttacagtggaaacggcaaaggagatcggccggtagatcaaacggaaagaaggaccggtagattgtacgagggaatggaggcgctttggcgcgctgacggaaaagaggggctggctgaaagcgaagtgcgccaaatgaatgcgctggtgttggcctatgtgggcgatacggtatacgatttgatggtacgcacttacctggcagagcattatgccggctcggcccataaactgcatcaaatggccattggctatgtcagcgcccatgcgcagagcgatacgctgcaccggctgctgccggagctttccgaagaagaagcggcggtctaccgccgggggcgcaataccaaaagccctaccgtgcctaaaaatgccgatgtgacagagtaccgtgcagcgacgggattggaggcgctgatcggttttttatatcttgcagggcggtttgagcggctttcgcagatcggacagatgattttacagcctgggcaggaggacaagcctgcagcgaaggaggaataagggatggcacaggtcaaactacatgtggagttgctgcgttatacaaaagatgcggacgagatcgtggctatgggggggaagatgtgctattccgcctcggatatcgataccatcgcccaaggggtagccaccaaagaccagagccggtatatcgagcggctgatggggatggggcatacctcggtgatcgagcacgccagctttaccttcggcatagagggagtatcccgggcgctgctggcgcagatcacccgacaccgtatcgccagcttttccgtccagtcccagcggtatgtggggcagcggcgggatgagggaacctttaactatatcatgcccccgcggatcgcggctttggggccggaggcgcagcagcggtttaacgaccagatggcccagatccagagctggtataacgaatgggtggacgccctgggcaatgcgggcgaacagagcaacgaggacgcgcgctttgtgatgcccaacgcggcggaaaccaagattatgatgaccatgaatgcgcgggagctgatgcactttttctccctgcgctgttgcaaccgcgcacagtgggagatccgagagctggcttggcagatgctggaaaagtgcatggaggttgcaccgcggttatttgcaaacgccgggccggggtgtgtgcgcggcgcctgcccggagggtaaaaagtcctgcggacaagcagggcaggtttgccttcgccaggcggcgcttcgagataaaaataacgcgtaaagcgattgagaaagtgggattagcagatggctgattataagaacagggcgggtagccgccgggaatatggggctgcgcctggcaggcgtacagagcggcgcgtggcgccggccggctttagggaggagcgcaggggcgcccggcgcggtccggcagtccaaggagatgcccgaaggccccagacgccacaacataggcctgcaccggcgcggcagccggaggcggaagtggaagaacgcagcttgccggaaaatctgctgatgggccgcaacccggtgcgcgaggcgattcgtgcgggccgctccattgataagctgttggttgccgatggggagatggagggttccgctcgggagctgctccgtatggccaaggaggcgggcatcgtcatccagcaggtggggcgtgcccatctggatgaactctgtatgggcggccgccatcagggctttgcagcctttgtagcggtgcgggactatgttactttggccgagatgttagccgcagcccgagaaaagggggaagacccctttatcgtagtgctggacggcgttgaggatccccataatctgggttcgatcatgcgcacggcggaatgctgcggcgcccatggcatcgtcatccctaagcgacgtgcggtgggtatgacccctatcgtggccaaggcctctgcaggggcggtagaatatctgccggtggcccgtgtgaccaacctgaatacagcgcttgaagagctgaaatccgccggggtgtggatcaccggggcggatatgtcgggccagccttattatcagtgcgatttcaaaggccccattgccctggtggtggggggagaagggcagggcatctctcagctgctgaaaaagaactgcgactttgtcgcttcgataccgatgaaagggaagatcgaatcccttaatgcgtcggtagctgcggccgtgctgatgtgcgaggcggccaggcaaaggagtttgtaatggcggggcgcggacttgtgccggaagagctgctgtttgtggacggctacaatatcctgggcgcctggcctgaaacgcccaggctgcagggcgttgggctggatgccgctcgggaggtattgatcgagcgaattgcggaccattgcggatacctggggtacccggtgattctggtgtttgacgcccacttaacgcgggaccctgaacacagcgaacagtttggagagctggaggtggtgtttaccgcccccggctgtacggcggaccagtatatcgaacggcgggtcgccctgctgcgagggaaggcgaaggtgcgcgtggcctccagcgacgcgctggtacagggcacgatcatgacctatggcggactgcgggtgtccgcacgggagtttttagaggaaatggagcgctgccggaaggataacctaaagcgccagcatagcgcgcagccaatcaaggcccacctgctggacgagcggcttgaccctgagctgcgctgccggctggagcgcttgcgccgccagggccgtggttgacgaggcggggataaaggcgctataatgctgaattagagcaatatcgcaagggaaggggcatacatatcctgagccggtataacgacatgaaaagtatatatgagcagacgccggatgagcagttggtgcattatgcccgcttgggcgataatgatgcgctggaatacctgttggaaaaatacaagaatctggtgcgctccaaggttcgctcctactttttgatcggtgctgaccgggatgatatcatgcaagagggcatgatcggcctatataaggcgatacgggactttaagccggataagcagtcggggttccgcgcctttgcggagctgtgcgtgacccggcagatcattaccgctatcaaaaccgcgacccggcaaaagcatatacccctgaattcctatgtttctctcaataaacccatctatgatgaagaatccgaccggacgctgatggatgtcatctctggggccaaagtgaccaatccggaggacatgatcatcaaccaggaggattttaaccacatcgaagagaagatcggggagctgctcagcgattttgaatgggaggtgcttaccgcctatcttcaggggcgttcttatcaggagatcgccgagaaactggaccggcgggtcaagagcatcgataatgcgctgcagcgggtaaaaaagaagctggagaaatacctggaggaagagtaactttgtcgctattttctgcggggttcaagcgtaaatcgatattgacaaacaggggctattttagtacaattaatctcagcttcaggtttgtccatgcgggtgtaactcaatggtagagttccagcttcccaagctggctacgtgggttcgattcccatcacccgctccattttttaccctgttgatcttgcaaatataatttgctgtaaaaaagatgaataattggggcttataaacattaaggaggaaaagatcaaatggctaaggctaaatttgagcggacgaaaccgcacgtaaacattggcacgatcggccacgtagaccacggcaagaccacgctgacggcggcgatcaccacgacgctgtcgaagatggggcaggccgaggcgatggcttacgatgcgatcgataaggcgccggaagagaaagagcgcgggatcacgatcaacacggcgcacgtggagtatgagacggcgacccgtcactatgcgcacgtggactgcccggggcacgctgactatgtaaagaacatgatcacgggcgcggcgcagatggacggagcgatcctggtggtaagcgcggcggacggcccgatgccgcagacgcgcgagcacattctgttggcccgtcaggtaggcgtgccgtacgtgctggtgttcatgaacaagtgcgatatggtagacgacgaggagctgctggagctggtagagatggagattcgggagctgctcaacgagtacagcttccccggcgacgatacgccgatcatccgcggatctgcgctgaaggctttggaagcggcgcagagctcttccgacgtagcgaacgagccggattgcaagtgcattttcgagctgatggaggcggtagacagctacatccccgagccggagcgtgcggtggatcagccattcctgatgcctgtagaggacgtattctcgatcacgggccgcggcactgtggccacgggccgtgtagagcgcggaacggtaaaggtgcaggatacggtagagatcgtcggtctgacggacgagaagcgttccacggtcgtaacgggcgtagagatgttccgcaagctgctggatcaggcggtagcgggggacaacatcggcgtgctgctgcgcggcgtgcagcgtaacgagatcgagcgcgggcaggtactgtccaagccggattctatccatccgcacacgcactacaaaggcgaggtgtacgtgctgacgaaggaagagggcgggcgtcatacgccgttcttcaatggatatcgtccgcagttctacttccgtacgacggacgtgacgggtgttatcacgctgccggaaggcgtggagatggtaatgcctggggacaacgtgcagatggaagtgaaactgatcacgccgatcgccatcgaagagggtctgcgttttgctatccgcgagggtggccgcacggtagcctccggcgttgtggcttccattattgaataattaaagattgtattgaaagcggggacagggttgtctgtccccgctttttatatgcgcaaacaaaattgccggaaagggcggaaatctctgaccagatgggcttttttggttgacaacttgcctggggtatgataaatttaataaagcgtcaccccttggggtgttttttagtgatgaaaattctaggaggtaccagaagatgcgcgtaaagatcacactggcctgcacggaatgcaagcagcggaattatgatacgaccaagaacaagaaaaatacgccggatcgcttggaagtgcgcaagtattgtaagttttgcaaggcggagaccgtacatcgcgaaactcgctaaaagccatgcgcctgatttaagggaaacgggacaactaattgcgaattgaggatgtgaagctatggcgggcatttcgctcaaaaaggacccggcggggtcttctgcacccgagaaagggcgcaagggcggggtaaaagcgcagaataataaaaagcaaaagcgcaagcccttccgttttgtgcgcgaatcgttggtggaattgaaaaaggtgaactggccttcccgtaaagagcttatctcttacacggtggctgtggtcgtctttgtcattctattcatgatcgtgatcggtgcggttgacctgggactttcccagctgtacaagctcgtgataaattagggtgggaggtagaggttatatacctctggtctaaatatgtctgaaaccactgctagtgctgcatggtatgtcgtccatacctattcgggatatgaaaataaggtaaaggccaacctggaaaaaaccgtggagaaccgcggcttgcaggatctgatccttgaggtaaccatcccgatggaagagcagatcgaaattaaaaacgggaaacgtaaaacggttcagcgcaagctgtatccgggctatgttatggtcaaaatgatcatgacggacgaatcctggtacgtagtgcgcaatacgcgcggcgtgacggggtttgtgggcccggggtccaagcccattccgctgtccaatgaagaggtacgctccatgcaggtggagatggtcccggtcaagttggatgtggaagtcggccagaatgtccgtgtgctgtccggtccgctggagagctttatcggtacggtgaccgatgtggatgccgagcggcaaaaggtacgcgtatctgtatccatgtttggccgcgaaacgccggttgaactggatttcacccaggtggttaccttataagtaaccttttatttgcttccaagacatgagcaatcatgtgttgtgatagtgggagggaagcgccgcgcaagcgtggctcccgcctgaaccacaaaacgaagaggaggtgtcaaacatggccaagaaaattgcgggttatatcaaactgcaggtgcccgccggcaaagcgactcctgcgccgccgatcggtccggcgttgggtcagcacggcgtcaatataatgggattctgcaaagaattcaacgagcgtacggcaaagcaggccggtctggttatccctgtggtaatcaccgtctatgcggatcgttctttcagcttcattaccaaaacgccgccggccgccgttctgattaagaaggcgatcggtctggaaacggcttctggtaagccgaatcgtgaaaaagtcggcaacatcaccactgcccagatccgcgagatcgccgagctgaaaatgcccgacctgaacgcgaacacggttgaagcggcgatgagcatgatcgccggtacggcccgttccatgggtgttgtcgtcgtcgactaatagcgcttttagtaatgtgggaggacgggcgtggcccggccgataataccaccaaggaggaaacaaaatgaaacatggtaagaattaccgtgccagccaggagctgatcgaccgctccaggctgtacgataccgctgaggctgtgcagctggccctccagacggcaaaggctaagttcgatgagaccattgaactgtccatccgtttgggtgttgacccgcgccatgccgaccagcaggttcgcggcgcggtggtgctgccccatggtaccggccgtacggttcgcgtgctggtctttgccaagggcgataaggccaccgaggcgcagaacgccggtgccgacttcgtgggcgccgaagagctgattgccaagatccagaatgaaaactggtttgattttgatgtttgcgtagccacccccgatatgatgggtctagtgggccgcatcggccgcgtgttgggccccaagggcctgatgcctaaccccaagagcggcacggttacgatggacatcaccaaggcgatcgaggatatcaaagccggtaaggttgagtaccgcgttgaccgttccagcatcatccacgtgccgatcggcaaaaagtctttcggcgaagagaaactgctggagaacctgaacgtgttggtggatgccgttgtccgcgcgaaacccgctgcggccaagggtacctacatgcgttcgatggtcatctcctctacgatgggccctggcatcaaaatcaacgcagcgcgcttctaaattgtattgacgggacgcctgtcccctggtataatattagcgttgtcaattaaataaatggccaccgcagacagcaggtgccctttagggcataaaggtttaccgcctgccgaggtgcgcatggatattgtattacacaatgcccctgtgccggtctgcgcacaggggctttttattgcgagtgaagatgcaaggaggtggcaaagaagaatgtcccagaatgttgaactcaaaaagacggttgtcgccgagatttctgatcgtttcgcacgcgcgcagggcgtggtgctggtggattatcggggtctgacggtggaggaagtgacgcagctgcgccgcttgttccgcaaagagaacgtggagtacaaggtactgaagaatacgctgatcggccgcgcggccaaagagcagggtattgagggcttggatcccgttttggaagggcctacggcggtcgcctttggttatgacgatccggtcgctccggcgcgcatcgtttgtgactttattaaaaagaccaacaaggttgagatcaagtgtggcgtcgtatccggcaaggtggtagacgcggccgcggtcaacgacctggcgaagctgcccagcaaagaggtgttggtggccaaaatgcttggctcgctcaattccccggcagcagggctggtgggtgtgctcagtggccccgcccgcgcattggccgttgcgcttaatgcgatccgcgagcaaaaagaacaggcgtaagttaagcgcctcaagttacgcgtaaagcgaatcaaaaaatttggaggtaaatacaaatgactcgtgctgaaattatcgaagccattaaggaaatgaatgttctggagctctctgagatggtcaaagagctggaagagatctttggcgttagcgctgctgcccccgtggccgtggctgctgctcccgccgccgccggcgatgctcccgctgctgaggagaagagcgagtttgacgttgtgctcaaagaagtgggctctgagaagatcaaagttatcaaggctgtgcgtgagctgaccggcctgggcctgaaagaggcgaaggaagcggttgatggcgcgcccaagaccctgaaagagggcgtttccaaagaggatgccgagaagatcaaggcgacctttgccgaggttggcgccaccatcgagatcaaataagaaaccagggtttcttaaaaggctccgcgtatgcggagcctttttatattgcatgaggtcaaagttacccgtggggaggacaagcagaaatttgaaccgagctaggggagaatgtgggagagcaagggtgaaaatcggcaaatatgaaaataaagttgtgttttatccgtataaatgcaggaatttgatgcaagtttgtggtattaatataacgtgatggcgctgtcggacgagatggacagtaaggggcggtttgaatgttgttgcgtacagaacaggaacgccgggaggcagagctgctcgcgccctgggctgcaaaagcggcgcagacccgtggcagagaaagggcgattactccctgtgagatccgcaccgagtttcagcgggatcgagatcgaatcttgcattgcaagagtttccgccgcctgaagcataagacgcagatgtttctatccccggaaggagatcactaccgcacacggctgacgcatacccttgaggtttctcaaatcgccaggacgattacccgggccttgaacctgaacgaggatttggccgaggcgatcgctctgggacatgacttggggcatacgccctttggacacagcggcgagcgggcgctgcgcaaggtgatgcccaatggctttgagcataatgagcagagcctgcgcgtggtggattttatcgagcgcgacggcgaagggctgaatttgacttgggaggtgcgcgatggcatcgcccaccattcggggcctgtggagccacagacgctggaaggcaaggccgtgcatctggcggaccggatcgcctatatcaaccacgacatagacgatgcgatgcgggcgggtatgcttcgccaggaggacctgccgcaaaactgtttggcgatactgggcaagacccatggacagcgcatcaacaccatgattttggatattatccgccatagcggtggacgcgaggcagtggagatgtcgcccaggattggcaaggcgacggatgaattacggagctttatgtttaaagaggtttaccatcgctccatcgatccggcgcaggaggcgcgcgcagagcacgtgatgatcgcgctgtacgagcactttgtggcccacccggaggcgctgccgggcgagatgcaggcgcgcattggtcgctttgatttaagctgcgtggtaggggattatgtggcgggaatgacggaccgctttgccgtaagaacgtatgcggatctatacatccccacggcctggcatgttttggatagcgaatgattcttataaaaataaagggttttggcgaaagatgtcgaataaaacccattcggcccctatgcgtggatggggcagttaggtgatggataaatggcaacttatttcccggagcaatggttaaatgaactgcgcagccgcaatgatattgtatctgtagtttcacagtatgtgccattgcaggcaaagggacgccgttattgggggtgttgcccgttccattcggaaaaaacgccctcgtttagcgtcaaccctgagatgcagatgtactattgctttggctgcaaggcggccggcaatgtgatcggctttatcatggccgcggagcgactggatttttttgacgccgtgaaactgttggccgagcgggtgaacatgcctttgccggaaatggacgagcgtggccggcaggattaccagagagagcgggttttgaaagatcagctttacgaggtcaacctgatggccgctcaatactttagggatcagctgaatacctcggcggggaagcaagcgcgcgcctatttggccaggcggggcttgagcgagcataccatccggcggtttggactgggttacgcgcccgattcctggaacgctttgctggactttgcaacgaaaaagggaatccccaaagaacggctggtacaggctggactggcagtacaatccaaagggcggacctatgatgctttccgcaaccgggtgatctttcccatcattaatacgatggggcgggtgatcgcctttggcgggcgggtgatggatcagagcctgcccaaatacctgaactcgccggagacgccggtgttcaacaagcggcacaacctatatggacttaactttgtaaagcgccagcacaagccggaacagctctttgtgatggagggctatatggatgtggtatccgtagcgcagcagggcgtgatgggcgcggtggcttcgctggggaccgcgctgaccagcgagcaggcaaggctgcttaaacgatatgtggatcgggtgatcctcagttacgatggcgattctgccgggcagaacgcggcgcttcggggcttggacatactccataaagaagggttggaggtgcgggtgctcccgttgcccgagggtatggacccggatgaatatattcgcaaatttggcaaggaagcttgggacaagctggcgcaggatgcgctgacgctgcccgcttttaaaatgaaaattgccgcaaagcggcaggacctttctaccctggatgggcgcacaaaatacgccatcgccgccgcaaaaattatcgcggccgtggaaaatgcggtggaacaggagatttatttaaagcgcttacaggtggaaacgggtttttcaatggaaagcctgaaggcacaggtagatggaagcggcgcggaactaacccccaggcataacgtagaacgtacccggaatactaaggatgacgcgcaaaccgagatgaatccggagacgcgggccggctggtcgcttttggccaacctggcatcaaacggcgagggcctggcctgggtgtatgaacagctggagccccaggcactggcagatgaaacgcagcagatgctgtatcaaaaattgcgcaccacagcaaaagaaggcgtaaaccttgcgccttcggatctgttagacgagatagaggatggcgagaaaaaggcgctggcagccagaatgctggctggggaacaggcgcccgagcagatgacgaaatatgtgcaggacttggtctgggagataaaaagccaggccgtggaacggaagatcagccaactgcaaagccaactgaaacaaagcggccttgatgcggaaacccgcagcgagctgctgcgggagatacaggcgctgatcgtcgcgcggcaaagcggccgccgccacagttaagggaggcgagtgtttgaaaaacaatcaggaacaaaaggaaaagatcaaagcactgctcgagttgggcaagaaaaagggtaatctcacctataaagagattatggacaccctggaggatatcgagctgagccccgagcagattgaaaagatttacgccacgctggagagcatgtcagtggaggtgatccgcgacgcttcggctggcgatatcgacctgagcgaggcggcggaggacgagcctaccactgaggaaaagctggatctgagcgtgccggagggcgtgagcatagatgacccggtgcggatgtacttaaaagagatcggcaaagtgcctctgctaacggcggagcaggagatcgatattgccaagcgcatggagcagggcgacgaggaggccaaacgcctgctggcggaggctaacctgcgcttggtggtcagcatcgccaagcggtatgtgggccgcggcatgctgtttttggatctgatccaggagggaaacctgggactgatcaaggcggtggagaaattcgattatcgccggggttataaattcagcacgtatgccacctggtggatccgccaggccattacccgcgccattgcggaccaggccaggacgatccgcatcccggtgcatatggtggagaccattaataagctgatccgcgtatcccgccagcttttgcaggagtacggccgggatccgcagcctgcagagatcgccaaagaaatgggcatacctgaggagaaggtgctggagattatcaagatcgcccaggagccggtatcgctggaaacgcccatcggcgaggaagaggacagccatttgggtgacttcatcccggatgacgatgcgttggcgcccgcggaggcggcggctttctcgctgtttaaagagcagctgatggatgtgctggacagcctgacaccacgggaggaaaaggtgctgcgcctgcgctttggcctggacgacgggcgggcccgcacgctggaggaagtgggtaaggagtttaacgtaacgcgggagcgcatccgccagatcgaggcaaaggcgctgcgcaaactgcgccaccccagccgcagtaaaaaactaaaggactttttagactaaactgcatagcgatacgcgaaatgagaatgggtttaaaaaagagtgggtataggctttaaaaaggcgaactcactcttttttatgaaagactgaaaaacagtatccctggcaaagcgcatgacctataagataaagctgtaagggcgcagaaaaaaaggaggcgcaagcgtaacaaatgaagactgcaattcaaaaaaatgcactgtggatatggttagctgtggccgctgtagccattgtattgatggtatcattttcgccggtggcggcgtgtgtaattggcttattacctttagctgtatattacgcattggcgtacttttctatacgtatgacgccggcaaaggatattttaaaatcgttgaccaaaaaagagatatggattacagttgccatctgtattggtttttttggagtaatgatgtatatcattgcaaaagaaaattttattgaatattgggattttggcgcatacaaaaactttgccctaacccaggggaaaatgctttttgatgatccatggggtaccttgcaggcgctttaccaaagcattaatacagctgaatataataatcttcttgcgttaatgatatcgatcccactgatgcttttagggggaggttatggcgcttgcaacttattggtcgtctttctgtttatcataccctttgccattgcgtttgcacttttaatgcggtgcttactgcaaaaatacggcttgaaacagatctcattttattggtttgtattacttgggtttataattcccccagtatttattcctgcactgcaaggttattgtgatgcgagtgttttactgcccattgcagcagttacgcttttaaccttaacgcgcgacttgggtaaattcaattggaagaaaaatttgctgacaggtatcttattaatatatatcctttggttaaggcgatatattgcctactggctattgggcggagtgcttaccttgctgatatggtcaattttccgcctgattatactacccaaaggagaacgcaagcgatttgccgctgggttttgcgccaatcttttgatggttggggctattggggcgggagtgatcgtcattttcttcccgggttattttgaaatgatgctctcctctcgatatgcggatgcttatgatgcgtatggacatggctcatacctgattcgttttgcacaaggcattcattatttaggtattgcaagtggtatcctctgcgccataggtgttgtacttgagttaacgcagattcgcaagcggcagtttatctgttttaacgcggtgcatttaatgataagtctgttgctttttctgcgcattcaaagcttgacagcacaccatgcttatattttggtcttacagtttatggttcttattgccggcagtttgatatacattggggcaatcgcagttaaatcacataagctgaacataacccggaatatagccggcggcctttgcgcccttctcgttgtatctaacttctttttaagtttaccggatctgtctgggataaatcagaaacccaaatttttcggaacagcggcgtatagggctaaaatcatgggacagtttggagatatcattgaggtgcgacagattttagagaacgttgcactagctcagaataagtcgatctatattattgccagctcgtctttttttaatgaagatatgatacgcaaaagctatatgccacaaaacgccccgcttaatctattatcggttacacatgtggataagagcaatggctttaatactgatttcttcggcgctgatattgtggttgtttgcgacccggtgcagtatcatttaagcaaagagggtcaacgcgtgattacggaactttctgatatagttacgtcggaagactcaccgctccatgcgcattatagagtggtagactcggttaccttacaaggtgtggataatggcggcgaaaggcaaaccgataaggaaagaagtgcggtttgcactatttacgaaagagtagaaccctttaccaaagaagacgtagaatatgtccgagaccgtttcaaagcgtactatcctgatttgccagaactctttgagaataggtttgatcagtatattcagacgcattttgcgcaaacggaaaattagcagtggaggaaggctatgcgagaccagcgggcagaggcattgcagcccagattgctgaccgtggcgggcatgctcgaaaaagacggcgcgctgcttgatgtgggcagcaaccacggcaggctgtgcgcctatctggcggctaccggctggaaagggcggctgatcgccagcgacatcagcgcgccctcgctggaccgggccaggcagcgtttccggcggctgggtcttgaagggcgcatagagctaaggaacggcgacggtctgcaggtggtggcgcctggcgaggtcagcgcctgcgtgatcgcgggtatgggcggcaggacgattgctaaaatattggaggacgcgccccgaggtgtggcagagacactgacgctggtgcttcagccgcaatcgcacttaagccagctgcggcactacctgtggacccatggatggcgtatccagtgtgaacgcctgagcagggacgcaggacggttttacgtggtgctgcgggccgtaccgggacaggaggaaccttatacgccggtagaagaggcgttggggcgccggctgttggcagatggagacccgcttttacaaacatatctatcgtggaatttgcaggtgttgtacaaaaagcgcaagggcatgactaatagccgccataataagcgggaagaactggagcgaatcgacgcgttgatcgcacgctgccgggagggatgaagatggcatttgcaagggttaaagatattgcggaagtgatggaccgctggtgcccgccggagtgggcggagagctgggacaatgtgggccttttggtgggcgaccccgcggcggaagtaaagcgcgttttggtcacactggatgtgacgccagctgccgcgtttgaggccgcacaaaagggcgctcagatgatcgtttcacatcatcccctgatctttaaacccctaaagtccctgcgcgcagaccgggcggggcagggcatcgtctggcgtttagcgcgggacggcatcgcggcgtttgccgcacatacgaatctcgacgtcgcccccggcggcgtaaacgatgcattggccgctgcgctggaactacaggattgtaagatcttggaagaaaacgcagcgcagatgtttaagcttacggttttcatccccaagggatacgaagaacgggtacaacaggcggtgtttgccgctggcgcgggccggtatggccattacgaccaatgcggctttgcggtggaaggccaaggcgggttccggccgcttgcgggcagcagcccctttctgggagaaactggccggcatacgctggcgcaggaaacgcggtttgaagcgattttggacgcggcggacagcgccgcggtagtagcggcgcttttaaaagcgcacccttatgaaacgccggcctttgatttagtaccagttaagatccccaaggcgcaggggggactgggctgcatcggctcgctgcctcgtacgatgaacggggaagaactgggacggtatatgtgcaaaaaattatcggcgcagggcgtgcggctgtgtgggacgcaaaaggagcgtataagccgggtcgccgtatgcggtggcagcggagcggggacgatcgattcggcctgtgctttgggcgcggacgcactggtgaccggggatgtggaccatcacgaggcgctgtacgcgctggaacgggggttactcctgctggacgcaggccatggggtaacagagcgggtggtactggactgcgtggttgaccgtttacaaaccgtcgcaaatgctttacaatggaatttagatatcgtaaaaagcgatgaaagccatgatccgtggatgtgggttcagggataagccggtgcttattccttttttatagggcccgcccgaagcggaaagatataaggagtgttgaaatgaagggtttagatcaattgtgggcttaccagaaggtggatatggagatcgataaggccgagcatgagcttaaggtatcccccgagcggcaaaagctggtgcgcacccgtaattttctggtggagcagcaaaacttgattaaatcgatgaccgaagcgatggccgataagcaggcgctggtggaaaaactgctggaagcgcacggcaagctggccgagcaggcggaggaatacgagcgtatcgttcaggatgaaaaggactttatcaccaaagaggagcttgagcagatgcgccaggaggagatcgagctgctggatgggctgaaaaagtgcgaaaaggagctaaatgccctgagcggggagatgcaggatcagatcgccaagctcaacgatatgcgggtgaagatcgctaaagcgaagaaagattatcccgtactcaaggagaaatacgaccaggcggcggccaagatcgtggaggctacccgtccgctggtggagcagcgcagcgagatggccaaaacggtaccggaggaactgatggcgcgctataaggccgtcaaaaaacaacggccgatgccggtggccaagctggtgggcgaccagtgcggcggatgctttatgaatattgcggcgctggtgatgcagcgggtaaacgagccggatactatcgtcgtgtgtgaaaactgcggcaggatcctttatccagtagaaaaataaaacttgtagacgcatagagaattatgatatgataggccttgtttgcgaggcagctggacagccgcggtccgcttcgggcgggacgaggaaagtccgagctccatagggcagggtgctgggtaacccccagtggaggcgactccaaggaaagtgcaacagagatataccgcccgttttgtagcgggtaagggtggaaaggcgaggtaagagctcaccagcggacggggtgacctgcccgctctgtaaaccccacctggagcaagattgatggaagagcgcggcggcccgccgcatttccagataatcgcttgagcctgcgggcaaccacaggcctagatagatggctgttcacgacagaactcggcttacaggctgcgctcgcaaagcaaacgccggcatttatgccggcgtttttgttatttaaaataaggtgctgtgccgctccagtacggaaacggcgtggtctatcttttctttggcctgctcgcccgtggtattgccatcgtgcacataatggatcacggcggtcttttctgccggggaaagggagccaaaataggtcaaggcctcgttattctgcgctaaggacatgccaaagccgatgggcagctctggcacgcttgatttggaaggcatgtctttattcctcctttgttttctctagtttcccgaacttactttaaaattatacgatgcgcgcggctattatcacaaggccgggggcacgctattaaaacggttaatcagacacgggagcacaacattttttagttgccacactgctgcgataaaaaagtatcgtgccgcatgtaaaagcccttgacaggcggagccagacatggtaaattataaatgtcaaagaaagtcaaagattgaaaagagggatcgtcatggattttaataaatatacccaaaaggcccaagaggccattggtttggctcaggagatcgccctgcgcagggaaaacccggaggtggggtgcgaccagctgcacctggccctgctgacccaggaggacggcctgatcccccggttgattcaatatatgggcaaggacccggctgcgatcacccgcgaggttgaggaggcggtaggcaagttgccgaccatgcgcggcggcaacgcccagccctatccttccaaggcattcagccaggtgatgctggacgcgcaggacgaggcgcaaaagttccaggatgaatacgtcagcgtggagcatttatatttagccctgctaaagagccgggatggaagcaccaaggcaattttgcggcgcaacggcattaccaaggatttgcttttaaaggcgctgcaacaggtgcgcggcggccagcgcgtcacctcgcaggatccggagcagacctatgaggcgctcaagcgctttggccgggatttaacggaaatggccaaagagggcaagctggaccccgtgatcggccgggatggcgagatacggcgtgtggtgcgcatcctttcccggcggacgaagaataacccggtgctgatcggcgagccgggcgtgggcaagaccgccgtggtggaaggcctggcccagcggattatccggggcgacgtgcccacggcgctggaaggaaagacgatatttgccctggatatgggcgcactggtggcaggtgccaagtaccggggcgaatttgaagagcggcttaaagccgtgcttaaggagattcaggaatcccaggggcagatcatcctgtttatcgatgagctgcataccatcgtgggcgcgggcgcggcagaagggtccatggatgcgggcaacctgctcaaacccctgctggctcggggcgagctgcactgcatcggtgctacaacgctgaacgagtaccgcaagtatattgaaaaggacgcggcgctggagcggcgcttccaaacagtattggtagaaccgcctacggtggaggacaccatctccatcctacggggtatcaaggagaagttcgaaatccaccacggcgtgcggatcaccgatggagccattatcgcctgtgcgaccttaagcgaccgttacatctccgaccggttcttgccggataaggccattgacctgatggatgaggcggcggctatgctgcgcacggagatcgactccatgccggcggagttggacgaggatacccggcggctgatgcagttgcagatcgagcgggaggccctgaaaaaggaggaggacgatgcctccaaggcgcggttggccgcgctggagggagagattgccgcgctgcaggaacaggtctccaagatgaaggcgcagtgggagaacgagaaaaaaggcattgcccacgtcaaggagatccagcaggagatcgagggcgtacgccatcagatcgagcaggccgagcgcgggtatgacctggaaaaactggcccagctgcgctatggtcagctgccgcagctggaaaagcagctaaaagacgcgcaggagcgcgaggccaataaagaactgctgaaagaagcggtgaccgaggaagagatcgccgacatcgtggggcgttggaccggcatcccggtagaaaagctgatggcgggcgagcgggagaaactgctgcacctggctccgcggctgcatgagcgggtgatcggccaggacgaagccgtacaggcagtggccgatgcggtgctgcgcgcgcgggcggggctgaaagaccccagacggcctatcggctcatttatcttcctgggccccacaggcgtgggcaagacggaactggcccggtctctgtcggtgcagctgttcgatagcgaggacgccatggtgcgcatcgatatgtccgagtatatggagcgccacgcagtctcccggttgatcggttcgcctccgggttatgtgggttatgaagagggcggccagctgaccgaggcggtacggcgcaaaccctattgtgtgatcctgtttgacgagattgaaaaggcgcacccggaagtcagcaacatcctgctgcagctgctggacgatgggcgcctgaccgacagccagggccgcacggtggactttaaaaacacggtcattatcatgaccagcaacgtaggctgctccattctgctggatgcggcggaaaagggcggcataacgcaggaagttcgcgaaaaggtgattgctgagctgcacaaatacttccggcccgaattcctcaaccgagtagatgaaacggtagtgttcgatccgctgaacatcgaacagatccgcagcatcatcacccttagcgtgaaggatattgccgtacgcctggcagacaggggctgtacgcttgatatcaccgacgcggcgcgggactatgtggcccgggagtcctttgatccggcctttggcgcccggccggtgaagcggtatctgcaacatacggtggagaatatgctggccaagcgcatgatcgaagggcgcattccggatcaatcgcacatcaccatcgacctggtagatggacagctagatgtggtgactgcggatggaaaaaccggcgcgtagacgcgtataaacatttggcgcgggaaagggtttagacgaaaaaagccataaatcccttgcccgcgctttttatttaccgattgtgcgcagaagctcaaatggccgtgcggttaaaaaggttgcttttatgctggccgccctgtatactgaggggtgcagtaaggggagcagcgcgaccgcaaaggtctgtgctgcttttcgatcttaggaggtagcattgggatttctgccggtaagtaaaaaagaaatgcgcgcgctgggctgggacgcggtagatttttgcctggttacgggagatgcgtatgtagaccaccccacctttgccaacgcggtgatcggtagggtgttggaagatgcggggttcaaggtgggcatcatcgcccagccggattggaaggacgaggccgcgtatggcgtatttggagcgccccggctgggatttttggtaagcgcgggcaacctggattccatggtgagccactataccgttgccaaaaagccgcggcgggaggatagcttttcgccgggcggtaagggcggtaagcggccggatcgggctacactggtctattgtaacggcatccgcaaggcctttggggaggtgcccatcgtcatcggcggggtagaggccagcctgcgccgttttgcccactatgactattgggataaccgcatccgccgcagtatcctggtggacagcggtgcggacctgctggtctacggcatgggtgaagcgcagatcgtagccatcgcccgtgcgctggaggcgggcaggcgcgccgccgagatacgggatgtgccggggacctgctttatggcccgggaggacgagctgcccgagggcgtcacgattcccagctttgagcaggtacaccagagccgcgaagaatttgcgaaagcgtttatggcgcagtaccgggagcaggatcccgtccggggcaaagtgttgatccaaaagcaggatgcgcgctatctgatccagaatccgccggccatgccgttaagcgggaaggcactggatcgggtgtacgagctgccctacgagcggcgcgcacaccccagctatgaacctatgggcggcgtgccggcgctggaagaggtgcagttttcgctgtgctccagtaggggctgttttggtggctgctccttttgcgcgctgacctttcaccaggggcggatcgtgacggcgcgcagccatgaatccctgctgcgagaggcgcagctgctgatccgtatgccggagtttaagggctatatccacgatgtaggcggccccacggccaacttccgcgcaccggcctgccgcaagcaactggacagggggacctgcccggaaaaacagtgcctttatccctcgccctgcaaacagctgcgggctgaccataaggactatgtggcgctgctgcgcaagttgcgggagctgccgggggttaaaaaggtattcattcgctccgggctgcggtttgactatatcatggcggaccgggacggtacctttatgaaggaactggtggcccaccacgtcagcggtcagctgaaagttgcgccagagcatatctcgccctgggtactggaacggatgggaaaaccgccgcgggaggtgtacgaccggtttgtacagcgttaccaggcgctaaaccgccagatggggaaaaagcagtatttggtgccctattttatgagtagccacccgggcagcgacttaaacgcagccatcgccctggcggaatacctgcgggattcgggccagcagcccgagcaggtgcaggatttttatcccaccccggggacgctttcgacctgtatgtactatactgggctggatccgcgggatatgcaaccggtatacgtgcccaaatccgcatcggaaaaggccatgcagcgggcattgttacagtataaaagcccgcataattattggctggtgcgcaaggccttagagcaggccgagcgtatcgatctgatcggcaacggcaaacgctgtttgatcggcgagcggccgccgcgtacgggagagggcacagcccgccgcacaacagcgcagaggcctgacagtaaacaagcgccgcacaaaggcgcgcaggccaaggggcagcaccacggaaaaaggccggaggccgcgcgcggaaagccgcaccgggatgagaactccggaagaggcggaaaggcgcgaacgggcgggccgaaaaaaacggcgggtgcaccgcgtaaaccggccgcgggaagaggacgcaaaaggggttaaaacccttgaacggggctagattgcgcaggccatgcgacccctcgccattccttgctttttgaaaccaaatgtgataagataatttggattatgaaaaggctgtggagaggcgcgccgttttacggttggcttgcccgctgccgaaagataaaaacgaatcatgaaaatgcgctaatttcgcatatgaggaggagcagaaggcatgaattgcacgatggaaaaactggagaaggaccaggttcgcctgacgatcgaggtggatgcggagcagtttgaaaaggggattgtggctgcgtaccgtaaaatggtgaagagcatgaatatcccgggcttccgcaagggcaaagccccccgtaaggtgattgagcagttctatggccccgccattttctacgaagaggcgtttaaagaggtctatcccgatgcgtatgaaaaggccattgaggataacgacctgcagccggtggattatcccgaggtggatattaccgatatcggcggcgatggcgtaaagtttaccgctaccgtgcagctgaaacctactgtaactttaggtgattataaaggtataaaagtggaacggcctgagtacactgtgacggatgaagatgtgcaggccgaagtagaccgcgccctggagcgcagcgcccgctggatcgcggtagaagaccgcccagtgcaggatggcgaccgggtgacgctggattatgccggcacggtagacggcgtggcttttgagggcggcacggccgaggggcagacgctgaacatcggctcgggcatgttcatccccggctttgaagagcagatggtgggcatgaaccccggcgaggagaaggacctgaacgtgaagttccccgaggaataccaggctaaggaactggcgggcaaggatgcggttttccatgtaaagctgcacgacattaaggaaaaagagctgcccgaactggatgatgaatttgcaaaagatgtaagcgaatttgatacgctggatgagtataaagccgacattcgggctaaactggaagagcagaacaaacagcgcgcggacgcggcgtatgagaacgccctgatcgagaaagtcgctgagaacgccactgtggagattccgcaggtgatgattgagcggcagatcgacaacatgatgcgcgagtttgagatgcgcctgatgtaccaaggtctgcggctggacgactactttaccattaccggttccaaggaggaggatgcccgtgcggaatttgccaaggatgccgatacccgcgtgaaggtgcagctggtgctggaggctatccaggaggccgagaagatcgaggccaccccggaggagctggatgcggagatcgccaaaatggccgaacaggccaacaaacccgttgaagagtaccgcgcatccctgcagccgcaggatatggcatacctgacggatatgatcgtgatgcgcaagacagtggccctgctcaagggcgaataagacgtgaagagcaatcctcacgaaaggaggcatttttgatgaatttagtccctatggtcattgaacaaaccaatcgtggtgaacgttcatatgatatttatagccggttgttgaaggatcgcatcatctttttggatggcgagatcaacgatacaacggcaaacctggtggtagcgcagttgctgtttttagaggcggacgacccggaaaaggacgtgatgctttatatcaacagccctggcggctcggtttctgcgggtatggccatttacgataccatgcagtacattcgtcccgatgtctccaccatctgcgttgggttggccgcctcaatgggcgcattcctgctggcggcgggggtaaagggtaagcgcaagtgcttgcccaacagcgagatcatgattcaccagcccttaggcggcgccaaggggcaggcaacggatatcgccatccaggccgagcagatcttgaggatcaaacgcaagatgaacgagattctttccgcccgtaccggccagccgcttgaaaaactggcccaggacgtggaacgcgactattatatgacggcggagcaggccaaggaatacggcctggtggacgagatcatcaaaccgcgccggtaaggtgcgaatcaaagaaaaggaagcagaaaatgaccaaatacgatgaacccaaggcggtaaaatgctccttttgcggaaagacgcaggaacaggtccgccggttggttgcgggcccaggcgtctacatctgcgacgaatgcattgagctttgccaggagattatcgaagaggaatatacccattctgccgatatcgattggcaggacgtgccaaaacccatcgagatcaagaccattctggacgaatatgtggtcggccaggagcgggccaaaaaagcgctggccgttgcggtgtataaccactataagcgtgtgaacgccggcgccgaaaagagcgaagaagaggtagagctcaccaagagcaatattctgatgctgggccccacgggctgcggcaagacctatctggcccagacgctggcgcgcattttaaacgtgccctttgccattgcggacgccacctcgctgactgaggcgggctacgtgggcgaggatgtggagaatatcctgctcaagctcattcaggcagcggattacgatgtggaaaaggccgagcgcggtattatctatatcgatgagatcgataaaatcgcccgcaagagcgaaaacccctcgattacccgggatgtatccggcgagggcgtacagcaggcgctgctgaagattctcgagggtacggttgccagcgtgccgccacagggcgggcgcaagcatccccatcaggagtttatccagatcgatacctccaatatcctgttcatctgtggcggcgcgtttgacggaatcgagaggatcatcgaaaaccgcacggggaaaaacaccatgggctttggcgcagagatgatgagcagcaacaaaaccgaactgggcaaggtgctggaaaagatgctgcccgaggatctgctcaagtttgggctgatccccgagttcgtggggcgtctgcccgtgatcgtgacgctgaacgcgctggacgaagaagcgctgatgaatattttgaccgagccgaagaacgcactggtcaaacagtataagcgcctgttcgagatggacggcgtggatctggagtttgaaagcggcgcgctgcgcgctgtagcccaaaaggcgatgaagcgcaagaccggcgcgcgcggattgcgcgcgatcctagaagaggcgatgctgggcgtgatgtacgatattccctcccgagaggatattgaaaagtgtatcattaccgaagccagcattgtggatgcggagcagccgctgatggtggtggccgataaacccgcgttgcccgaggccaaggagggcgagagcgccacagcaggcgaaagcgcctaaagcaaaagcaaatatggaccggccctgatcgtcagggccggttttttgtaaagaaaaccacgcgttagacgcgtggttcaaaagagcctatggcgatgaagaagaaaactccctttgctaaaataaagtgtagtctgccaactgcacaaagaaagcaaagggagttttcatatgggtataaatgatattaatagtctatcgcatagccgatggaattgcaaataccacatagtatttgcgccaaagtacaggagaaaagtgttttaccaagagaaacgggaagcagtggggaagatattaagacaactatgcgaatggaaaggagtaaatataatacaagcagaagtatgcccagatcatgtgcatatgctggtggagataccgccaaagatagcagtatcaagcttcatgggatacctgaaaggaaagagtagcacaatgatgtatgagcaattcggggaactgaaatataagtataggaatagagagttctggtgcaaaggatattatgtagacacagcagggaagaatgcgggaaggatagcagaatacatcaagaatcaattaaaagaggatgaattgggagagcagttaacaatgcctgaaggcagcccttttaagggcggcaggtagcagaatacgcagttggtagacatatttatgcgtttacgcatcccgcgaagaacagagggcttcgcccgcacatgaaataccacccgcttggcgggtggatgtttattgctgcataaaatagtgcagccatataaggggagggggccaggggtaagcgaatattggctgcactggcgaaaattacatgagtctgcatcgtcaggcgcaggttgcaaagggaccttttgacagggtataatggtgaaagcgcagccgggcggatttagcgcggctgggtattggaggtgcttttaggctgcatgcagaattttaatgtaaataatatgccgatgctggcgcttcggggattgatgctcttcccgcacatggtgctgaattttgacgtggggcgggataaatccatcgccgcgctggaggcggccatgctggaggatcaatcgatctatctggccatgcaaaaggacatcaaggacgaggatcctgctcccgaccagatccattcgattggcacggtggctaagatcaaacagatcctcaagatgcccggcgatgtggtgcgggtgatggtggagggcgtatgccgcgcccgcgccattcaattcgtggagaccgagccctttttgcgggtggagctggagatttatgaggatgtggagggggagccggatatccagcgccaggccatgatgcgcctgctgtgcgaccggtttgccgaatttgtttcggcggggggcaaggcctcggccgaaacggtggaaacgctgcgcgagatcgaaagcgcgggacagctggctgacgtgatcgcagccagcaccgttgcgcgcctagaacagcgccaggacatattggaggcgctggatatcgacctgcgtatggagcgggtctatgagtacatgcagcgggaactggaactgctgcgcctggagcagcgtgtccaatcccgaatgaagcggcagatcgacaaaaaccagaaggaattttatctccgcgagcagatcaaggcgatccgcaaagagctgggcgaaaacgagagcgagcagaccgatgagctcgccgagcgcgcccgaaagatggcgctgccccaagaggtgcgcgaaaaggtggataaggagctgggccgcctgggccgcatgacgccgggcaccccggaaatcagccagttgcagacctatatcgagtgggtgctggatctgccttggggcgtatatgcggacgacgatatccgcctgcaaaaggcacaaaaagtgttggacgccgagcattacggcctgcaaaaggtaaaggaacggatcgtggagcacctggctgtgcaccagctgacccgtagcgtcaaagggccgatcctgtgctttgctggccctccgggggtgggtaagacctccatcgcacgcagcatcgcccatgcgatgaaccgtaagttcgtgcgtatttcgctgggcggtacgcgggatgaggcggatatccgcgggcaccggcgcacctatatcggcgcaattcccggtcgcatcatcacggggatgaagcagagtggctccatgaaccctgtattcctgctggatgaggtagacaagctggggcacgatatgcggggcgatccggcggcggcgctgctggaagtgctggatgccgagcagaacagcgcatttcgggatcactatttggaggtggccttcgacctgtcgcaggtgctgtttttgaccacggccaacgatatcggggcgatcccggggccactgcgggatcggatggagatcatcaatttgccgggctataccattgaggataaggtgcagatcgctaaaaagcacctgctgcccaagcagatggaggcccatgggctgcaaaaggatatgctgcacattgccccggcggtactgcgcgccattgccgacgattatacccgtgaggcgggtgtgcggcagatggaacggcagctggcggcggtttgccgcaaggccgcgcgcaagatcgccgcaggcgaggcggaaagcgttacgttgcgcaaaaaggatctggaggaatatctgggcaagccggtattcaagcgccaggagttgacgggtgagcgcctgcctggattggtgaccggcctggcctggaccagctatggcggcgatacgctgcccattgaggtagccgccatgaaggggacgggcgccgtggagctgaccgggcagctgggcgacgtgatgaaggaatccgcccatgccgccatcagctatatccgcaccattggcccagcgataaaaataccggatgaatttcccaaggggatggatctgcacatccacattcccgaaggagctatccccaaggatgggccctcggcgggcatctctatggcgacggcgatcgtcagcgcgttgactgggcgcccggtgcgggagcatctggccatgacgggcgagatcacgctgctaggacgggtgttggcggtgggcggtatccgtgaaaaggtgatggcggcctatgcccagggcgttcgggagatcatcatgccgacggagaaccgcgcggatatcgaggaggtgccccagagcatccgcgataaaatgaccttccacttcgtggagcacttccgccaggttttggacctggtgtttaccaaagcaaaaggagagtaggatgctgcagatcaaaaaatccagcttcattaccagcgccaagggcgcggaggggatccccaagggcttcccggagatcgcgattgccggaaagtccaacgtgggcaagagctcgtttatcaactatatggccaacaactacaagctggcccgggtcagcgggcagccgggcaagacgcgcatgctcaacgtttaccgctttaacgatgcgttccagctggtggatctgccgggatatggctatgccgcggtatctaagggcgaggtcaaatcctgggcgggcatggtggagggatactttatgtactcgcataacctgcgccatgtgtttttgctggtggatatccgccaccgcccgggtgagcacgataagatgatcgcccagtttctccagcagtatcagatcccccataccgtgctggcgaccaagtgcgataagatccccaaacgggattggaagaaaaagtgtatggacatcgcttttgacctgcgccaggactttgcggacgatatcataccggtatcggcgcaaaacaagatcggccgcgatcaggttttggggcggatcgctgcggtgcttgccgagccggtggaggtctttacaggcgagtgcgacgcgcagcttgaaccgtaagataagcggcataacgggatgaggggaggccgtacaaaagatgaactggttaaaaaatatgagtttaaaaacgcgtattttagcggcgcttttgctgctgacggtgatccccatggctgtgaacagctttttagcttataatatggccaaacaggccttgattgaaaatgcgctaatctattctcaggacgtggccgaccgggtcatggagaatatcgagggctatcaaaataagctgcaggcggtagccaggcgcgcggcacaaaacgacgaggtgatagagaacctgcataaggaatacggcggggaggatgcgcaggctgccagcagcgattttcagaaagattacgatcaggcgtccaagtatctgagcagtctgattacccccatccccggcgtgctggagatgagcatctgcaaggcgggatcgggttatccgatgatgttcagctccacgccgcgtacggatatcgcggtcgatcagtgggattataccaaggagctttggtataccagcgtgggcgaggcgagcacgcatgagatatatcttgataatgtgatctatgaaaatgccgaaggggaggagatccccagcatgatctatgccgtattgatcagggatgaacgcggagcggccaaagccgtagtccgcgtgacggcggcccagtcgatgatcgatggctttgtgcaacgggccgggcgggataagcgccacgaaatatcggtaaccaatcaatatggccgcatcatttacgacacccgcgaggataaagcggccagcatgtttttggatgcgcgtctgctaaaacccatcgacagcggaaaaaatgggcagatactaaaggaagacggcgtatctaccctggcctattgcaataacagcgcctcttctggatggcgggtcttcagcctgatgaaggaggaatacctgacgcaggcgctgggcgataacggacggcttttcgtgatgatcgcgatcatcttctcggtggttgcggtgatcttatgttactacgtggccatgcatatcgtccggcctctgaagtggctgaaaaacagcatggaccgcatcgaaaagaagaattttgaggataccatcgtttggaagtataatgacgagatcggcgacctggcggccagctttaaccgcatgagcatgcgtctgaagatcctgatcgcccgcatctacgagcaggaggccgagaaacgctcggccgagatgtttgccctgcaggcacagatacagccgcactttctgtataataccctaaatgccatacgctatatggcgatcatccaaaaatcaaaggggattgccgatatggtatcggcgctgatcaccatcatgcgctcggtaacgcgtaccaccaccggccccatcccgatacgggaggagatcgaatggatcaaatcctatatctttattgaggaaacgcggtattgcggcaagttcctggtggattatcagattgatccccaggtggaaaacgacctgaccatcggctttatcctccagcccatcgtggagaacgcgatcttccacggcctagagcctaaagaggggatgggcaagctgaccattgccatccgcgaaaagcaggaggaaggcatcgtagagtttgaggtgcgggatgacggcgtcggcgtggagcaaagcgatatcgagagctttatgaacgcggagctgcgctccaagcagcgcaggcgggatgtggggctttataatgtcaaccggcggctaaagctgaattatggcgatgaatacgggctgcagatccattcgcaaaagggggaggggacgcaggtgcgcattaaaatccccttggtgcgggaggaagtatctcatgtgcagggctaatgccagacggggcttagatatgatataataggagtacatgcctaggaagggctggttttgtccggcgggcatgggcgtttaaaacgggtttatggtataatggtgacgttataacaatataccagtaatggattggaaataggttccctagaggggttagaggtgaaagtaaagcgatgataaaattgatgatagtcgacgatgagccgctcatccgtatggccattaagaacctgttcgactgggaggagaacgggtttgagattacgggcgaagcctccaatggcgagacggcgctggccctgatcgagaaagatccgccggatattatcatgaccgatatcaagatgccaaggatggatgggatcgagctgatctcgcacgtgcgggaaaaatttccccagatcgtcgtggtcgtcctctccagctataacgattatgaatatgtgcgggaggcctttgtctacggcgcggtggactatatcctcaagtctgacctggataacgacaacttcgctaaagtcatctgtaaattacgggataagtatatcgccgataacgacataaaagtcgatacgctgaaaaaggaaaatcagatcaaacgggatattgaatatcttcgtgaggaatttttgcgcagaatggtcaagggacagttctccgatcaggcggatctggagcatgccctggcggtatatgagctgcacctgcgcgagggcagctacctaatgtgcaatgtggtgctggattacgtggatactgaggccagcgaggcggacttggtggcccagcgcagtacggcgctggatgtgctgcacgagatctttaccttcgacggcttttattttaacgacagccccaaccgctataccatgctgctgtatatgtccagccccagcgagagccagtttatgcaggacgtatacgcctttttgaacctgcttaaaaacaacctgagccgttatctgaacgtggaggtgacggcggggctttccaaaattctatccaagcaggaaaagatacccgaagcctaccggcaggcctgggaggcgctgcgcaatcatttttacgaagggccgggcaagacctaccattacagcgacctgccgcaggaagaggacgaagaggccctgcgccgctttaacgaacgggagaatatccagcgcgtcaaagagtacctctcccgcaaggattgggacagcattgacgcgtacatagccgaattccaggcctttttgcgcgcgcaccgctatgaggagcgcaaggtaaaggaattgctgatcaattttttcctgcttgtgcaaagcgaaatgatcggccaaatttcagcggacaatgcgctgctttataccaacgataaaatttatgccagaatcatgggctgctccacgctgaaggagctggaaagcttcatgaacgattacatcacgcacctgaaggactattgccgtcagatgacgcgggaccgttacagccgacccatcagtgagacgatcgagtacatcaatcgttatttcaaccaggatatcacgctgacaacgatctcggaaaagatcaatatgaatcccagttacctcagccgactctttttgcaggagaccgggatgcattttatcgactatattacaaacctgcgcatcgaaaaagccaagatatacctgaagcagaaggattgcaccatgcaggagatcggcgagatggtaggctatgccaaccccaagtatttcagccagatcttcaaaaaaattgtcggcatgtcgcccgggcaatatcgcaatcacggttaaattgttgaaaaatgtggatgattgtgcccactttttcaaagttcatttttaaagtatatttatttatgtagggtcaatactgtacatttgaattttggtatgataaaataatccctggtggggatttcgacgtaaatctcaccagccctaattcgagacgaacgggcgatgcctcgtttgctataaatttattaaaagggagctgttttcatggcactggcgacactgaatgatctcattaaaatcacgacgaaaaacaagaatgcggtaggtatgttcaacgtaatcaactacgaatatgccgtagcaatgattaatgcggccgagcaggtgaactaccccatcatgctgggtgttcccgagggcttcgttaagaactattacgatctggacacgatgaccagcctgctcaaatacctggccaccacggcgaaggtgccggtagcgatccacctggatcactccaagacctttgagaccacggtcaaatgcatgcgcgctggtttcacctccgttatgtttgacggttctgcgctgagctatgaagagaacgtggagcagaccgctgagatcgttaaaatcgctcacgccatgggcgtatccgttgagggcgagctgggttatgtgggccgcaacggcgtagaccagatcgaccctgagtccttcacgaaggtagagcaggcggttgactttgtaaagcgtaccggcgttgatgcgctggccatcgcggtgggcaacctgcacggcaactacagctttgagcccaagctggactttgaccgcatcaaggccatcaaagaggcgaccggtgtgggcctggtgctgcatggcggcagcggtattgctgatgacgacttccgcaaggctgctgagctgggcatcgataaggtcaacatcttcacggagatcctggactttggtaagaagttcaccctggagaacctgccggatatgaccttcctgcagtactccaaggctttggccgatgccatgaccgaggttgtcaaatatcgcatggaagtgttcacctgcggtcgcaccctgtaagttaaaagtattacgttaaaggagtgctttgagcatggatattattggcgtaggcggtgccaatatggatctgctggtgcagatggatgagatcaacctgggctttaaaacgcccatgggggatttctccctccagggcggcggcttaatcgcctctgctatggcggcagcggcccggttgggcgcaaaagtcggcatggcgggcgccattggggatagcacctttggcaaaatggccatggaagacctggctatggatggcgtggatacttcgcatatgatcgtgcgcaagggcgcgcgggatgcttttggcatcattctggcggagaaaaagaccatggagcgtacgatcctgggccgtcagggaaccgtggaaccggcaaagtttgaggagctggatcacgattacctggtttcgggtaagttcatgttcctgtccacggccgatgagctgacgatcagctgcgcgaaactggcgcatgagcacggcgtgaaagtgggctatgacgccgacggccgcgcggatccggagatttttgatctgatcccgtatctggatgtgttcatcgcctcggaggtttggtaccacaaccattatggtaccgaggagaattttgaaaagcatgtacgcgagattcaggccatgggtccggagatcgtagtggtgactttgggcgtgcgcggatgcgtaggcgtggataaggatggcaagttcttccaggtcccgtccttccgcgtaccggtcatcgacaccaccggcgccggcgatattttccacggcgcgttccttgtggggttgttgcagggctggtcggccgagcagacggctcgcttctccagcgcggtatctgcaatcaaatgcacccgtctaggcgggcgcgcggcattgcccaagatggaaaccgtactcaaattcctggaaacgggcgagatcgagtatggcgacatcgacgagcgagtcgaacttttccgcagccgttctttctaaagggcagttggggaatggaataatttataagggggattcactacaatgtacgaacagcataagatcaagatcggtattgttcccgtacggcgccagggtgccttcggcagcaaggaagctgcttttgcccagcgcgacctgttctggaaaaagctcaaagagatcacgcctgaggccgttgagctggtggacatcaacgacgtgacggaagatggcatcgctcaggagctcgagcatatcgatcccgtcgtcaacaagctgaaagctgccggtgtgaacggcgtattcttcccgcatgccaacttcggcccggaagagatcaccgcccgcatcgccgctggcctgaatgtgcctgtgctgatctggggcaaccgcgataacatgcccgatcctgtgaccggcaaccgcgagcgcgatacccagtgcggtatctttgcggtgaccaaggtgctccagcgcctgcacgtgcccttcagctacatcgtgaacgtggacatcgaagatcccaagttcaccaagggctttggcgagttctgcggcacggtttccgttatcaagagcttccgcggcatgaagatcgcgcagctgagcacccgtccccgtccgttcatgagcgttatgtacgacgaggccgacctgctccagcgctggggcatccaggtgttcccgatctcgctgcccgagctgctcagctccatcgacaacatggttgccaagaacgatgacgaattccaggctgcctataaggacatcaccagccgctttgccatgcgcgacatggatgagatggcgatgaagaagctggtcgcgctcaaacccgcgatgaccaagctgatcaaagatgtgggcgcggatgcctgcgccagcgagtgctggatcttccgtagcctgatcggctgctcttcctgcgcgatgttcggtgagatcaccgacatgggcattccggtagcttgcgagaccgacgtaatgggcgcgatcaccagcgtgatgacgcaggccgccgccctgggctccaagaccaccttcttctccgacctgaccatccgtcacccggagaacgacaatgcagagttgctgtggcactgcgggccttacagctattcgctggccaaggatccttcctccgccgcgatcgctgctggccgcgcgcagtttgagatcaaggacggccccatcaccgtgaaccgtctggatggcgtgaacggcaagtacacgctcttcaccggcgagggcaagggtgttgaaggccccaagacctccggtacctatgtatggctggaagtggacgattgggagaagtgggaagagcacctcatgttcggcccctacatccaccactgcaccggcatccatggcaactattcccgtatcatgatcgaggctgccaagtacatcccgaccctgaacgtggatgcgatgatggattatcgcatgagcctgggtttctaaattaaacttacttgaggccgcgcggtatgtctgttagcaaataagaggcatgctgcgcggcatcatgatattgcgttgcaccatatcggtggcgcaaatgaattgaagataagggaggatactgaaatgagcactgttttagagcaattgcaggccctgaacccggaactgaacatccgttgcgtgtgcgacccggctttccgcaaatacggtaacgtgcataagggctttaacgtacagcccctgatcgactttttgaagaagaacatcgagatccccgcggataagaccgcttacatcgcctcgatccctgaggcggaggagagcctggatctctatcaggaagtgtccgatgtgatttacggcggcatgcccatcgagatcggcatgtgctcgggccacaacgtgatgatgaacggcatggagtggcataagggcaacgaagtgatcgtcgccaccagcgatacggtactgttcctgggctgcttgagcgatatcgacttcaccggcgagaagatcacctatgattccaacaaggtggagacattcttcctgcccgagggcgagatgatcgagctgtacgacacctgcctgcacctggcgcccatgcatgcgaaagctgcggacggcttcctggtatcggtcatcctgccgcgtggcaccaatctgccgctggataaggaagtatccggctacaagggcgagcccgagctgctcaaagccaagaataaatggctgatcacgcatccggatcgcaatatgggctacatgggcatcgaaggcccgaacctgcagcttaagagcctgtaaggaattgacaaaatgctaaaaggcgattcgggggttagccccgagtcgcctttgggcataaaaggaataaggagaaaattcgatggaaaagtgtcaagtggaaagcttgcgcaagtttgcaaacgagatccgcaaaaagaccattcactgcatcggcacgctgggtgtaggccactttggcggcagcatgtcggtgtgtgaggcgctggcggtattgtatcaatcgatcatgaagatcgatccccagaatccaaagtgggaggagcgggattggttcgtactttctaaagggcacgcgggccccgcagtgtacgccacgctggcgctcaagggctttatccctatggaaacgttggataccctgaaccagcccaatacgatccttcccagccattgcgaccggaacaagaccccgggcgtggatatgacggtgggttcattgggacagggctttggcaacgcggtgggtctggcgctgggctttaaaatggacaaaaagcctaaccgggtattctgcatcgtgggcgatggcgagtgcaacgagggctccatttgggaaggtgcgatggcatcggcacactttaagctggataacctgactgtgatggtggatgacaacggcctccaatccgatggtaggacgaccgatatcatgaatatgcagcccatggataagaagtgggaagcatttggctgggacgtgcagaccgtggatggtcatgatgtcgagcagctttacaacgcgctgacatacgaggcgccggctggtaagccccgctgcatcatcatgaagaccgtcaaggggaaaaacctgctgggctttgaggatgtatccaccaaccacaataccaccattacccgtgaacaaatgctggcggctatcgctgctctggaggaggtagaagcataatgaaggatacgcttgaaatgcgggaagtttatacccgcgccttagagcagttaatgaaagaggatgagcgcgtcgtcgtggtcgaggcggatctgagccgcggcgtgaataccctgcgcctgcgcgacgagttccctggccgccatatcgatgcgggcattgccgagcaggatatggtcacgatctctgccggcctgtctatcagcgtcaataagattccctttacccatacgtttgcgcccttcatctcccgccgggcgatggatcaggtctacctgtcggtgggcttttccaacgccaacgtgaagctggtaggttctgacccgggcgtaagtgcggagatcaacggcggcacgcacgatggctttgaggatgtgacgctgatgcgcatggtgccgaatatgacgatctttgagccggtggatgccgagcagctgcgccaggcgatgccgcagatctacaaacacgtagggcctttttacatgcgcatgttccgcaagcagaccgaaaaggtgttcgatgagaactaccggtttgtgttgggcaaggcggacaccctgaaagagggtaaggatgtggcgattatcgcctcgggcatcatggtggcggaggccttaaaggccgccacggccctgcacgagcaagggatggaggcgcgggtgatcaacctacacaccattaaacccatggataccgaagcggtactcaaggccgcaaaggaatgcggcgccatcgtaacggccgagaaccacaatatcaacggcggcctgggcggggcggtgtgcgagtatttaagcggtgcatgcccggttccggtaaaacgcattggcgtgcgcgaccactttggcgaggtgggcaagctggatttcttgatggagaaatacgccatgaaggcttcggacattgtcaaggcctgtcaagaagccattgccatgaagaaataatgccttttgtagcataaaaaaaccgcgggattttcccgcggtttttttatggcttaaacgcgtgcggcgatctccaccgccaggcttagataccggtcgtccgcgctggggggcactttacccatggtgcgcgcatcccaatcctcgccatccagcgtatcctcgccgtagaggtactggtagatctgtacgccgcggaagtgacctgccgccataatactggcgcattccatatccacgcagatacagccctcatcccggcgcgcctgcatattgttgcgggtctcgcggtaaatggcatccgttgtccatgttttgccctcgataaagggaacttgcagctgggtaaagatctgcgccagtttgggctgggtttcaaccggataataatcttcatcggccggggcgtagtgatagctgaccccttcgtcccggtaggcgggggtaggcaggataaagtgcccggcggcgatatctttgcgcagggtaccgcatgagccgaaaaagatgaattttttgccgcccagggcgatgatctcctccaatagcccgacagtgccggccccgccgatcagcgtttggtaaagcccgacggcctgcccatcgataacggcttgatagatgggaaccgggcttgcgccgtgcagggttttgatgacggtgggcgaatagcgcgcaatgaaccgctggacgatcttgtggcggaaggtgaccaacaccgtttcagggaatccctcaatgggggagagcaggtgctgcggcgtaaagatctcgggtgaatgggggtcaaaagcatggataatgctcatggtcaaactccttcagacatactttaggatattataacatatcaaagtacagtttaccgtctggattgacaagagggatgcagaaccgataagatagaacggtagaagggatgaaggcgagcttatgaaaagatggctggccctgggcttatgtgcgttgctgatgtttgcaccaataggcccggcggcacgggcaatggaatatgtggattacgactgggagctttcagccgatgaaaaggtgatgcgggacgcaggctttatcgaggtgcatcaggccaacgggttgatatgggttaaactgatgtatggcacaacggataacttagccggatatgacctgtatggcgacctgaagcgggcctacctgcacccttcagctgcgctggcactggggcgtgcgcagcgtctgctgtatgcgcaggacagcaccctggcgctttgcgtaaaggatgcggcgcgcccgctgcgcgtccaacaggcattgtgggatgcgttgccggacccctctttgcggggatacctggccaaccccaagaccggctcgctgcacaattacggcattgctgtagacgttacgctggtcaatgcccgcacaggggaagagctggatatgggctgcccggtggatacgctggacgcgatctctcagccccggtacgaacagaagtttctcaaagaagggaagctgacccagcaacagctggataaccggcttttgctgcgcagcgtgatgacgcaggcaggctttcagaccattcccaatgaatggtggcattttcaaacgatgaaccgggcgcaggccaagcaggcctctacgctcattccataatcaatcaaaccaagcagtgcacaggagggatagggcccatgtccttaaaaagcatactgaatcgattggaagattttccggttatcgccgcgtcccgcgagaaagaagcgctggcgcgggcgggagaggcggatgcggggatcgtctttgccctgggcggggacgtgctggagctggcgggccaggtgcgccgcctgcaggaagccggcaaaaaggtgtttgtgcatatcgatctggtggatggggtgagccgcaatccggctggggtccggttgatcgcccgccatatccggcccgatgggctgatcaccacccgtagccccctgatccgcgtagcggcagaagagggcatgcgcacgatcctgcgcatgtttttgctggattcggcctcgctgggcagcggaattaaaatggtgcgggaatgccggccggatatggttgaggtgatgccgggactgttgcccgaggctatcgctcaatttaaggctgcgataccccagcccatcatcgcaggaggcatgatcgtacggaaagaccatatctatgccgcgctctctgcaggggcgctggcggtatcgacctcctgtgaggtgctgtggagggaataaaatcgcaaggccctatcggttttattactgttgtgacgcgaaattgaccgcatcgaaaccacgagatcgctattaaagctgaactgaaattgcggggaagacggtttagcagataagagaagttaagaatgataagaaacggtatatcgcgctggtgttgctggcggatgagcaagaagatatgatagaccgttatatagacagaggatggatgtacgttcttgaggataacggcgtaaagagcgagtgcgttgttacagacgaaggagatggcatactcgaaatcaagaatatcgcggccgagccggtctttcagggccagggctatggagagcggctcatcgcgtttatcgccaagacttaccgggggcgattttccattttacaggtgggaacgggcgattgcccggcaagcctttctttttatgaaaaatgcgggttttcccgttcgcatagaattaaaaacttctttacggatcattatgaccatccgatatttgaagaggatattcagcttgtcgatatgatctatttaagaagaaagctttagtcttataaattcccccaggcctaccggggcaactatcgtataaattaaaaaagcagcaggcatgtatgcgcctgctggttttcaatataaagcgtagctatgcgggtatctgttctggcgcaatgtcctcgcctagatgatgcagatgcttacggtataacgaggcaaagatcagcaaactggcggccagagagaccgtttcggcaatggggaaggcgtaccagacgctctccagcccgatctttgagagcaggtaggccaccggcagcaggaccactaactgacgaagcacggagataaagaggctgcgcgcacccatgccgacggcttggaacagggtcgaaaaaattatgccgatggccgccggcacaaagcaaaggctgatcagccgcagcgccggtacgccgatggcatacagctcttccgaggcgttgaagatggccagcagctccttggggaagatccaaaacagcagcgtgcctagtagcatgatgccgcaggcgatgatcgagccgaacttcagcgcgtccataacccgccgcttgttcttggcgccatagttaaagcccatgatgggcatcacgccatgcgtaaggccaaataccggcatgaatacgaaggactggagtttaaagtaaatgccaaagaccgatacggcgatctccgaaaaaccgaccaggatcgcattgatccccatggtcatgaacgaaccgatggactgcatgatgatagatggaagacctaccgcataaatatcgcgcactgcgcgccagttgaatttaaattttttaaaggtaatgtggatggcgtgcttctttttaaagatgacgatcaagctgaacaccattgccaggatctgacccaacacggtcgccaaagcggcgccggcgacccccattttggggaagcccagcaggccgaagatcatgatcggatccaggatcaggttggtaacggcgccggtcaactgaaacagcatgggatagatcatgttcccggtagcctgaagcgtcttttccagattgacctcgatgagcatcccaaaggacatgatggtaacgatggagagataacttacccccatatcaaaaaccaccgggttctcggtaaagctggcaaaaaaagcccgcgtgccaaagatgccgtacagcgcaaagatcacccagctaaaggcgccaagcaatatgccatgggtagcggcgcggctggcttcctcctgccgcccttcgcccagccggcgggataccagagagttgatgcccacgccggtacctaccgccactgcgatcaatagagattgaatggggaaggccagcgatacggccgtgagcgcgtccgggctgtaccaggatacaaacatactgtctacgacattgtagagggactggaccagcatggaaaaaattgagggcagtgacatggatacgatcagcttaagcattggcgaggtgcccatcttgttttgcgttgcgctttccatttgtgcataatctcctttcaaaacgtttagccgcaatctatgggccggctccaatacacatgctgcattgggccggcctgtggcgcattttggctttggcatgaaaaggatcaaaaaaatgcaggctgctttttgtccaatgggggattgcggttccgcttggaaaggggcagcagccgagccaatatatgacgctggtacattataacatataaggcatatatatggaagaaaagtggggatttaagcgaggagatggaattggatagaaaaatcacccgcaggtttgcctgcgggtgactcaatactgttttaatgggttacgcttagccctgccagttgatagcctccaacacgttattatcggcatccgcaaataccacgatgtggccggcggggatatcgctggccttgaccagaatactgcgcacgggcatcaacggcgcatcctccgggatctcggcctgatcggccggggcttcggtagaaacgtggatgaccaccatcttgtccgtacggatgatgccctcaaaatcgatggtgtagcccggctgctcctgcttgccgcaggtcacttgaaccagcagctggtcgatggggacggactgagtctcctcggggtagatcacccggtactgggcgccctcgccctgaagcgtatcggtagaggcttcgtcaaaataagagtattcgacctcctcaccttcagcagtcagctcctccttggtgatagaggctttgagcagcagcttttccgtttcctgactggtggcgctggcttgcacatcgctggcaaaagcgcggcggacttgaaagatctgggcaatctcctgcggggcttcaaagtagtggtagatcagctggggttcgccttcggcggtggctagatcctccaccacgcaaaaaaactggttggcctcatcgtaataaattttgcattgggcctgattctctcctttgaccacgagcgtatgggaggcatccgccacattatagtagtaattagggcccatactcttgggctgggcgttaaacagggcctcgcaaagctgtaaaaattcctggcagctgccggcacgcatggtgtcgcagtaaaaggtattggattggcgcccttcagcggtgtattctgtttcaatggcgctgacgctatccgcgctttccagcccgctttcagttaaaagctgcgcggcgcttttatctcccgtagactggcatccgcaaaggcataggcatagcagcacgatcaaaacaaagattccatacgaattgcgcatagttcctccccatttctaggctttggcaggcaaaacgcgcggcgtgctccaccatagggcctgaaggtctgggagagcagacgcagcagcgtttaaaaaattatccttttcaaacctatttataacgattatactatattcgtaatctgaaaaacaaatccggtttttgatacgggaaaggaaaattctgagagggaatgaaaagacatctttcaaccaacgcttcaattatcgcgacctgtcacagcctgcacgagcgcgggtacgttagcgcctacggcggcaatgtaagcgtgcgcacgggtaacaacaagatcgtgatcacccgggctaaatcctcgctggacgatctgggcgaggacgacttggtggtggtggatatggacgggcgggtgttgttcggcaccaatccgccgtccagcgaaaccgcgctgcacctgatggtttatcgtacgcgggaggatgtgcgcagcgtcatccacacccatccgccggcgtccacctcctttgcctatgttaaccgcgagatcatccccatcaacccggagagccgcaattacatccagcgcatccccgtggtgccctataggcccgtgggaagccaggagctggcggatgagtgcagcgaatacatcaaaaactggaaggtactgctgctggagcgccacggcctggtcagctgcggggagaatatcgacgaggcctataacctgaccgagttggcggaggaaatggctatgatgaacctttacgtgcggattttgcgcggtcagtaaaaattttaaaaaagcaggcagcttttgacaggcacctgcttttttttatgctcatagccgggcggaaagctgcgaaaactatcctcaaaaaggagggataaacatgcagcgattgcaaaaagggctggtgctggcgttaggcgctatgttggtggcgtttacgctgaccggatgtaccgacaatgacgacggctctgtgcccagcgataccgcgcagccttcagccaacgtaacgccgctacccagcggcgcgcccacggatgaagcgcctgtagtaacgcccgacccggaaccgccgatcgtgacccataacgcgcctgacgcggccagccccatgcccacgatcgacccgaaactcgtaagccccatgccggaatagacggcctggcccggaagcagctcttggcaaatggccaaagtgcgcgccttccgggccctgccatttcttgacagagaattgagaagaacctataatgattttggatcattatcactgattcccaggccttcgcctgggctttctatctattttgcgccgcgcgcgggaaaagcacgggccgctattggctctatggagggaaaacgcttatgttaatgcggaacctgacgatgatgacggatctgtaccaactaacgatgatgaacggctacttccgctatggtaagcgggatcaggtcagcgtattcgatatgttcttcagaggccatgctttgcaggaatacgccgtaatggcggggctggagcaggtgatcgagtatatccagaatctgcactttaaccgggaggacatcgaatacctccgctcgctcaacatatttgatgaggatttcctcgagtatctcaggaccttccgctttaacggggagatttatgccatgccggagggcagcatcgtattcccgcaggagccgctggtgcgcgtaaaagccaagatcatggaggcgcagttcatcgaaacggcgctgcttaacattattaaccaccagacgcttatcgccaccaaggcgcgccgggtggtgcaggcggcaaagggcggcagtgttttggagtttggcctgcgccgcgcccagggaccggatgccggcattttaggcgcgcgcgccgcggtaatcggcggatgcgacgccaccagcaacgtgatgaccgggcagatgttcgatattccggtcaagggaacccatgcccacagctgggtgatgagcttcccggacgagctttccgctttccgggcgtatgcggacgtgttcccggacgggtgcatgctgctggtggatacctatgatacgttaaagagcggcgtgcctaatgcgatcacctgctttaaagagctgcgcgccaaggggtacgagccggtgggcatccgcctggactcgggcgacttggcttacctgagtaaaaaagcgcgccagatgctggatgcggcgggcttcccaaatgccaagatctttgcctcgggcgatctggatgaggaccttatttgggatctgaatgcccagggggcctgcatcgacgtgtggggcgtaggcacaaagctgatcaccagcgatggatttacggcgctgggcggggtgtacaagctctcctgtgaggatgagaacggaacgatggtgcccaagatcaaggtatccgagaacccggtgaagatcaccaatccgggctataaaaaggtgatgcgcatttacgataacgccaccaataaggcgatcgccgatctgatcatgctggaggaggagagcgtggatgagagcaagccgttgacgctgttccacccggtagatacctggaaaaagatgacggtgaccgatttccataccaaagagctgctgcagcccatctttgtggatggaaagctggtataccagcagcctaaattgcagcagatctgcgcctttgcccgggaggagatggagagcttctgggaggagtaccgcaggctgcgcaacccgcatgtttataaagtggacctttcccaaaaactatacgacttaaaacaggagttgttgaaaaaagcccgcaacggcaaagcataagctgtaaggaggggagagcatggcgtttggaaagaaggaaagagaagcggtttcccttcagataaccaagacggaaaacgagaagctcaaggcgcgcgtaggcgagctggagggcgaggtagagcggttgaaccgcgaattggagcgttaccgcaaggacgaggcgaatatcgccaaagccctgctgtttgcacagactcgggttgaggagatgaaccgcagcgcggaaaaggagtttggtaccgtgcgtcaggcttacctgcgcgaattgcacgatttggagcgcagcatccgccagcgtagaggggagctgaagctgctggaggagagcgcggcgcgcatactggccggcctgcaaaaagacctggcccaaatgggcgaccccgaggagacgccattgccgatggaacagatggccatcgccggtgtagagccaaagccctacactgcctatctggaagaggaacaaaaccagccggtggaagacagccgggaggaactggcgcggctttgccgggagctggggatcgtatccggcctggagcaggaaccagaagataaaggcgaggcaaagggcgaggaaataaaagggcaggaagctatgcccgaatacgacgcttaagctaaacaagagtaagcctttgcgcaaatggatacgctatgcgcaaaggctatctttatgtttaaaacttaagatatgcttaacagtttatccaagaggccttgcgcgtttgatttttggtgcggcatatgataaatttagtgttaggcccggaggggaaaaaagacggcttttggagaaccatagccgtgaacgggagatagacgatggctgaaacgttagtcgtaatcgatgggtacagcttgatgcatcgcgctttttatgcgctgcccatcctgagcaataaaaatggaatttataccaacgccgtatacggtttttgcagcatgctattcaaaattgtggcggattacgcccctagctatctggctgtggcatttgaccataaggggccgacctttcgccattccacgtttgaggcctataaagcggggcgcaaggcgacgcctgaggagctcaggccccagtttgacctgctgcgcgaagtgctggaggcgatggagatcccctgttatgagctggcgggctacgaggcggacgatattatgggtacattctcgcggctggcggaggaaaaaatggtgccctgcctgctggtcacaggagaccgggatgcctggcagctgatcggcaacatgacccgggtgttgttcacccgcaagggtatcagccaggtggagtgcctggatacggctggccttgcggcactagccggagtgaggccggatcaggtacccgatcttaagggattaatgggtgatgcatccgataatatccccgggcttccgggcgttggagaaaagacggcgctgaagctgctgggccagttcggcacgctggaaaacgtgctggagaacccggaccaggtatcgggcaaaaagttacaggccaccatcagggaatttggcgaccaggcccgcatgagcaaacagctggccaccatcgaccgggaggtgccgctgcacctggattttgccgcctgccttttgcaatggcccccgccgcaaaaagcgctggataagtttgaaagcctggagatgcgcagcctgttgagccgcttgccccaggcgcagaccaatggaggcgataaggcgccggtagccgagatccagcgccagcggttgaccacgttagaggcgctggcggagtgtgtcgcgtctttgaaggatccggtcgccttaacgttgacgccggatgcgttgacccttgccgacagtacggagcgggaatatacggtagccctgaagcagtccttgctggacgaggcagaggcgctggacgtacaggcggccgtgcaggcgattcagggctttttagaggatgacaagcggcctaaagtgctgcatgaggctaaaaaactatatcatttgctgctcacgatgggcgtgaccctgcgcgggatcgcctacgataccgctatttctgcctatctgctcaacgctacggcggcctcgtatccgctcaaccagctgttggaagaggcggggctgggcagcgagcagcagggcgcagccatgctgatgcggctgaaaagcgtgcagagcgatgaaatggcgaagttgcagctgcaaaagttgtttgataccgtggagatgccgctggtcgacgtattaatcgaaatggagacccagggctttaagatcgacagcgaggcgctgcgaactacgggcgagcgctttgccgaccggctggcgcttttggccgatgagatttatacgcatgcccagggcaaattcaacatcaattccaccaagcagctgggcgaggtgttgtttgaaaaattgagcctgccccatggacgaaagaccaagacgggttattccacggacaacgaagtgctggagggcctgcgggggatgcacccgattatcgatcaggtgatcgaataccggcagctgatgaaactgaaaagcacctatatcgacgggatgctggcggtgatcgaccgcagggatcaaaagatccacaccagcttccagcagacagtgacggctacggggcgcatcagctccaccgagcccaacttgcaaaacattccggtgcgcaccgatatgggccgggaactgcggcgctttttcgtcgcctccgccccggaaagggtgctggtggacgccgattactcccagattgaactgcgggtgctggcgcacatgtccggagacgctacgctgatcgacgccttccaaaaggggcaggatatccatacccgcacggcagctgagatgtggggcgtacccatggaccaggtgaccgggcagatgcgttcaaacgccaaggccatcaactttggtatcgtctatggcatcagcgattttggtctggcccgtaataccgggatatcccgcacgcaggccgcccagtttatcgaaaagtattttgagacttatcctggcgtaaaggcctatatggatgaggctgtagccaacgccaaagatgcggggtatgtgaccaccttgctgggccggcgccggccgctgcccgagctgcatgccaagaactataaccaacgcgcctttggtgagcgcgtggctatgaacgcgcccatccaggggacggctgcggatatcatcaagcttgcgatgatcgcagtcaaccgcgcgctacgcaaggaggatatggacgcgcacctgatcttacaggtgcacgatgaattgatcgtagatgcggcggcgcagctgcaggataccgttgctgcgctgatgcgccgcgagatggagcaggtcctggcgctgaaagttccccttgcggtagacgtacacgctggctatacttggtatgacgctaaatagggggcgcttgagatgaagatcgtagggctgacaggcggcatcgcctcgggcaagtctaccgtcgcacagcaccttgagaagctgggcgccgtaatcgtagacgcggacgctatttcgcgggcactgtcccagccgggcggcagcatgtataatgcaattatgcacacatttggggcggaataccgggctgaaaacggccagctggatcgcaaaaagctaggggcctgcgtatttgccgatccggcgcagctggccaaactcaatgccatcagccatccgctcatccgcgcggagatcggccggcagatcgctcaggcacgcgaggggggaacccccgctgtcattatagacgcgccggttttgctggagagcggtatgcaggatatggtgcaggaggtgtggctggccgtattgccggtggaggagcagatttcccgggttatggttcgggatggcgcgaccaaagaggcggcgcaggcgcgcattgcggcccagtggccgcttgaagaaaagaaaaaatatgccgatgtctgcattgatacttcagggacgatagcggatacgtgccggatcgtcgatgagatttggatagaaagggttcaaaacagtggcaacggggccgaaaaaaacgaataaaagcagtaaatcccgtgggaaaaaggccaagacggaccgccggatcctgcgggtgaccttatggatattgggtatcgcgctatgcgcggttatggtgatcgtgggcttttccaagccctaccaacgcaggctctatccgctccgctttgaggagcagatcgttgcgtgcgccgatgagtttcaggtagacccctatctggtggcggcaatcatcaaatgcgagagcgggtttgatgaggacgctcgctccggcaaaggggccatggggctgatgcagctgatgccgacgaccgcggactggatcgccgaaaagctttccatgcccgctccggatgaagcgcagctgctaacggcggataccaatattcgcctgggctgctggtacatcaagtacctgctgaccctttatgatggggatatcactttggccgcagcctcttataatgccgggcgcagccgcgtgctctcttggctggaggacccggcgtacagcgacgatggcaagaccctgaaggcgatcccttttaaggagaccgaggaatatgttaaacgcgttaaaaacgcttatgaacaatatcagatcctatatcagctctaaacgcccttggcgggcgatggcggcgatgataatcgccctgtcccttacggcagggtgcgtagccgtagatgagagcgcccaggttatccaggcgcccacgcccacaccttccgccgtgcagccgatagccggcgggacgctgaagctggggatggatcaaaacatcaccacgctccacccgctcaaaacgaaaaaccgctcggtgatgaacgcactctccctggtctttgaagggcttgtgcgcctggatgataccggcaaacccatcgccgcgctggcggaaaagtgggaattgcaggaaggggaggacggcagcctggcctgggtctttaccctgcgccagggggtgagctttcaccagggaggagagctcaaggccgcggatgtagtctatagctttaatgccatcaaggcactgggcgagggcagctattggtctgccgggctttcaggcgccacggcctgtgaagcggtagatgattacaccgttaaaatacacgtgcaaacccccagttacgcgatcatagggggaatgaatttccctgtgatcccgcaaagttattatgcgcagcgggagagcgacccgctctgcttgcccaatggcaccggcgcgtatgtatgccaaagttacgcccagcaggaggggatgaaactggccgccaacgaaagctggtggcggcctcgcgccaaatttgacgcggttgaagttttgccctatgctacgcaggaggatatgcacaaggcgtttgagctggggcagctagactgtatcgataccgacagcgtgctgaccgggcaatatcaaagtgcatcggtccgggctggcgctaaggagtacacggcccacacgctggatgcgctgatctttaactatcagaatactttggcgcaaaacgaggctttccgggcggggatcgcctatgccatcgatgctaagaatattgcgaatacgacctatcaaaatcatgcgttgattactgaaggtctgattccacaggatagctggctgtactcaaaccagcataaggcatttgagcatagcaaggaggtagccctggcccagtttcaggctgcggggctaagctacgacacgcagacgcagaccttgcgccagggcggcctgcccgtcagccttacgttattggtctgcgatgatatttcaaacccatatatgcgctacgcggcagagaccctgcaagaccagctggcccaggtgggcattaccgttgtgcttgaccggcagggtgcggatgggtatgataaaaagctgaaggagcatacctacgacttggcgatggtgcgctataccgtaggcaccaccatggattggagctttgcctttgacacggaatcccccaattactgcggataccgttcggcgacgatttctcaagccctggaggatatcgcccaacagcgggatgaaaagggatataagcagacggtttcccagctggaacagtgctttgtttatgaggtcccctttatcagccttttttataggaccaatacgctgctgacacaggaaaaattgtataccaacgataccgctccactggacttgaatagttatcacggtatggataaatggatgcgtacgccctaaaaggagaaagggcgcgcaagcttgcgcgcccttgataccctagagcgtttagaaaagccttctgccacagaaggggcaaaacgagggcggctccgggccgcagcaatccccgataggacgcccgcagttgtggcaaaagcccggctgcggcgcgcaggcgcagctgtcatcacagccgcagggctgcacagggcagggggcttctccatccggaaagagggggagccggccccagatctcactgcaatccactttggggggacagggcagcaccagcgtatataggctgatacaggcaatggcggtaaagcatatgcgcgggctgcacacatcctcatagggctggggcagcggtttgcttagatccagcttatccaaacacgcggcgatctgataggggaagccgccggaagggatacgcagcgcggcgcgcaggcaaaaggtgagcgtgacgcattggtttgcacagcatccgcagctatcccgcagggtgacgacggcaggcacgcaggcatcggcggagaactgcaggcggcagggattgcaccggtcgggcttgcagcgtatgttatggaggcgaatcatgcggtcgctgacttcgattcggtcgatgcaaacgggcgggcgcagcggacagtctgccgctaatgtaaagcagcagggctggctgcatacttccttggccgtgcagtcaaatacgcgcaattgtgggcttggcggcgggcagcagtttgccggagggcagcataccaccctgggactggtatatggacgtaactgtggtgacataggcattgacctcctttggggtgagggtctatcatctacaagatatgtaatgaaataaatttggtgccataagataaaggagagaaacaccatgacggaagaacagatcgatgtactggtgatatattccagcttcggtaccggacatttgcaggtggccaggaccgtaaaggactatttggcgcgcctgcatccggagtggaagatcgaatgcgtcgaccagttggacgtgatccgttcaccgatccaaaacatcgggcgtaagctatataaccggatggatcggctctatcggcccttatatgcctttggttactacattaccaaaaatgtgcccatggggaactggaccaaaaaggccggcaggatatatgacgccaagatgtttggcgaatatatcgcccggcgcatgccgcggttgatcgtttcggtatttccggccgtcaatggcgcctgtgcgctgcttaaaaacctagggatgaatatccctattgcctccattgtaacggatgcggctgtgcatgcggagtggctctatcgtgaggtcagtctttacttcgttatggatgagcaaacgcgtgagggctgcatcaaatatggcatcgagccggaacgcatttttgccacgggtatccccacgcgcacaatttttgaaaagcagtatgaccgggctgaaacgcggcgcaaatatgggatggatcaagatcttccggcactgatgatcagcgccggcgggatgggctttatcgataccatgaagaccatggtgcgccacgcgcaggagacggaactacccatccaggtggtgctgatcaccgggcgcaaccaaaaggccatgcagatcatgaaagagtatgccaaggaagccaagatcaagatcattttgccgggatacgtagaaaatatggcggagatgatgcaggcttgcgatgcgattttaaccaagccgggtggcctgaccatgagcgaggtgctggtgtgcgggctgccgatgatcgcctacgacccggtgcccgggcaggaaacggctaacctgcgctttttaacccagcacggcgcggcgcgacatcttaaatcctgcagccaaatgaagcagatgctggaggatgtgttgtttaacgaggaaacgcgcaggtcgatgcgggaggcctgcctgcgcatcggctgccctaaggcggggcagatcagcgccgaaaaaatggcggcgctggtagaggaggtagaggaatgaccctgatctggaacctggtgatctgggccactttcggtgctgtctgcgcctttataggcgcggtgctgccggaaaagtggttcgatcacgacagcctgctggcgccgcccactgccaagtgggaacagggcggcgggatctattccagggtctttcgcattcactactggaaggattttatgccggacctggggtcgatgatcagcattgtgatgcccaaacaaaagctggatacagaggtacgtcaccaggaggatgcggatgaaaaggcctatctgcgccgctttgtcattgagacgcgcagggctgaggccgtgcattggatcatattggtatccggctttttttaccggatctggaatgacagtttgctgatcagcgggatcatgagcctgctcaccatcgtgaccaacctgccctttatcatgattcagcggttcaaccgtccgcggctggtgcggctgatcaagctgaccggcagacgcaagacgaaaaaaagggaagaacctacagcggtggaaacctaagcggcgccgtaaacagatacgaaaaaagcatccaagcgtgcttggatgctttttatagggcttttttattcgaccgatacgaacttatagtaatggtatccggcgggagagacaactaaaccctgcacggccggatccaccagtacctgctcgttataaaagaacagtggcgaaatggccgcatcccccaaaagaatattttccgcgtcatgataggcctgcatcgcggctgcgatgtctgtcgcctcctttgccgtggcgatggcgctatcataatcggcgttagaccatttggcgctgttataaacgctatcggtcaaaaacaggtcgaagaattccgccggctgcccatagtcgccagcccatccggtaaggcaaacttggaagatgccctctctgcgggcctgagaaaaggcttccagcgattttggaacgagggcgacctggagccccaggttatcttcccacatcgcctgtacggcctgtagagccgcaggattcatgtcttcaagataaatcaattcgatctcgggcaaaccgtttccttccgggtatccggcttgggccaaaagctgctgggcctgctggatggaggcttcggcctgttcgctgtccactgggaagagatcgccgccatcgctgcgaaaatcgttgccgctggcaaggtcgcggaccccggcaggaatatatcctccggcgggggagaccgcgccaaacagcgcatcgctgcagagcttctcccgatcgatagccagcgaaagggccttgcgcaccagggggttatcaaagggtgcggcgctgcaattaaagcttaaaaacgcggtgctgatctgcggatagcgctgcagcatacccgcctgtgccagcacgccggtcttttcgatgggatagaggcgcgagataaggatctgtcggctggtaaaagcggtcaaggcctgctgatcatcggtgatcatggcaaaatccagcttttggggcagcacagtttccgcggcataatacgcactgtttttaagcaacaccaaagagtgatccttttcccaggaatcaaggacgaacggcccgttgcataggagggcttcaccctcgcgtgcccaacgatcgccgccgtttaccatatcctgccgcaacggtaaaaagatgggcagggccacaacggcgtcaaacccggcatagggctgctttaatgttacgaccagcgtacgctcgccatcggcctgaacgccaagatcggtggcgggaaggctaccatcgttgacttcggaaccgtttttgataaattggcggattaaataggcgtgctgagcctgggtctcggggtcagcggcccgctgccaggcgtaaacgaaatcctgcgccgtgacgggcgtgccatcggaccagttggcctcgcgcagggaaaacgtccaggtcagctgatcttcgctgatcgtccaatcctgtgcgatgcccggcacgatgttcccggcagcgtccacgctggtcagcccttcaaatagctgaaggcaataaatggcatcattctggctgctcgctttggccgggtccagcgtatcgggcagcgtgcccaacgtcaggggtaaaacgccgctttccggaccgggcgtgggcgagggggaaggggcctgggcaggggtggaaggcgttgcctgctgtggggcgcacccacacaccagcaagagggcacaggtcatgaccagcgccatccgtttccatatagccttgggcataaaaaagttacatcctttctctttcaatgcgggcatgacggcagatgataaaaccttacgagcgccattcccctatacatcagcatatccagtcacaggcagatttatccaactggatatgcgttttatttgtctaaaggcgcgatcatctgccgcaggcaggccatcgcctggtcgatcgcctcaggcaatggaggcggggtaaggccggcgatgatcacatggcagcggttcaccggcaccaagatcttttgtgccggactctccgctacggcgcaggcgattctgggggtcagctcgcctaacagcgcgttggccaaaatgataccgatagggcccagaattatatccacttttcctgcgttaaacaggatagggttttcgccagtcgccccttcgtctgcgccggcgcgcaacatggctgcggtggctgtggcgttggtgcccagcgcaaggagatgcaccgagtcaccccattctttacggattgcggtaaccagcgcgcggcccacgccgccgccctgtccgtcaataattgcaatattcataactgctcccttgtattttatattggtgttgaccctccatatcatagcagatattgggtttttcttcaaatatagggtggtgtaggcgcatccacgggcaggcacacgaaagccccgcaggaattttcctgcggggcgaacccggatggggttattctgcgtccagcgcggcgatcacttcgatctccaacggcgcatccatgggcagccgggcgacctgaacggcagagcgggcgggataatccggcccgaaatactgctgatagatggtatttacagccgcaaaatcgtccatatcgcgcatgtaaacggttacttttacacaacgctccataccgctgcccatttcctctaacaccgctgcgatgttttgcagcgcctggcgcgcggccgcttgcacatcatccgccaccagcgtaccggtagccggatcgatgggcagcatgcctgaaagataggccaacccgccgtgaatcatggcggtagaataagggccgatggctttgggcccgcggttggtcaaaaaagctttcatagccaaatcctcctatagttcgccggcgcgccgcagcgtggctgggttaggatgctgcagccccagcattttgccaatggggaaggagagcaagaagaagaccaccgcgaccaactgcaccacgccgccgaatacatagagcatgcggataccccaaaggtcgataatccagccgcttacagagctgccgatcatggcgctgacgcccgaagccgccgcgcacagcgtttggccggtggcgttaagctcccggggaacgatgctgaaaatgtagctgaccgtgcagcttaagtacaggccaaaagccataccgtgcaggcactgcaccagaatgatctggaacacattctgtgcaaaaaagtaaaggaattgttcgatcatataaaggccagcaaccgtgaagatgatcttgatcaggctaaagcgcttggcaagtttcgctgaaaggaagagcatgggcacttccatcaaagccttgacggctacgaccatgccgatctcctcggagtgggcgcccacagcctcgaccagtttgggaaggaaagaggcgccgaagtttaccggcatgctgatgcacatgtaaaagagcatgaaggtgataaaatagtaatctttaaaaagccggccgatatgcaggtttttaagcggtacggacgcctttttcttatcgctcttgagcatcaggcacagcacgatcatcaccgcgccgaagaatacaaagccgtagaacgcggtttcatagggcgcgccgccttggttgatcagccaataataagagaaagaggcggcagcaaagccgatagacccccacaggcggatggagccgtagtttaggcgcatgccctgcgcctgggattcattggtggtctggatcacccaactatccaccagggccgtcagcggcatgcggaaaaaggtcatcaccgccatgacggtggccatgggaatatcgccgtaagccagcggcaggatgaccgacatcaagcttgcgccggctacacagatgatcagcaccttgcgggtagaccccatcttgtcgctgaccacgccccagatcggctggccgacgatggtcatcagattgttgagcgccagcacgataccgatgcctacgttgctcatgcccttggcgcttaaataaacgacgacaaaagagttggtcgccatagcggcccagaagaaaaactccaggctgctaaaatacgccaacagtttccggtgggggggaacgatccgcccccgccggtccaatctcacttttgactcggttaaattatccatggcttacacgccgatcctcctataacgctccacgcgttggtcgatctcggaatagtcgatctcaccggtctcaataaaacgcagggccacctcacgggtggggatagccgcacggccgcccatgcgggtgcacttgatggcggaaaccgcattgcagaaccgcgcgcgctggggcgtggtccaatcctcctggagggcggcgtaggcatacgcgccgtggtaaacgtcgccagcaccggtagtatccaccgcctcgacggagaaaccttccacctcaaaatagctgtcggtctcgtccacgccgacaacgcccttttcacccagggtgaaaagcacgacttcaggcccttcggcctttagcttgcgggcgttttcttcataactgccctggccttggaacttggactcataatagaactccgaggcgatgaaataatcgatatagtggatcatctcatccagctccggcgtgtacttatccgcgtcgatcagtacctttacgccactctccttggcccatttggccgcctggaaagaggcatccgagcaatcgctgatgtgcaggatcctggcagaggcgatcagctctttgctaaagtccgccggggtgtacttgcgggccgtaccgggatagtggaagatggtgcggctgtgggtcgcatcgtcgctcagcacaacggagatggcactttccttcccctcgtcgataatgatatgagaggtatcgatgccatgatccttaaaatcctgcagcataaatttgccgttgggacaatcgcccagaacggtgataaaggcgcacttggcgcccagccgcgccgaagcgacgatgccgctggccaccttgccgccgccctgggtagagtactgcaagatgggcgcgccggtgttgaccgggggcatggcagggatgcggtttaaaatatccacgcaggacaggctcatgccgataacgtcatatttcttttccataattacacatccgcctttaacagattgaatttgccgcgcaggaaatccttaacggaatccttggacatctggctgatctcaaagaggctgtccttatccggagccgccgcaatggaagcgctatagcctttatacatggcgcggaagtactcggtggcaatgttgaccttggcgatgccgcgggtgatggcctgtttgatctgctcatccggaatatccgaaccgccgtgcagaaccagcggaatatccaccgcatcgttgatcttgcttaaaagatccagctgcaggttgggggtagccgcataggcgccatgcgcgttgccgatggaaacggccagcgcgtctacattcgtcagctcaatgaacttgacggcctcatcaggatcggtaaacttaccgccggtagcaaaatcgtccaaattgctgccgctgcccacgtggcccagctcggcctcgacttcgcagcccagcgcatgcgccgcgcggctgaccgcggcggtcaatgccacgttttcatcaaagctcagcgaagagccatcgatcatgacagaggggaaaccggccgcaaggcccgcaaaggcgatctcgtaggtggcgctgtggtctaagtgaacgcataccggcacgctggcgtgggctgccagctccttggccgcgtcgcacattactttgaggggaatgtaaaaatcataccccggataaagctgcacgatgaccgggcgcttttcctcctcggccacctcgatcgcccaggcgatggtttcataattataggtgttaaatgccggcacgcaatagcggccctcctgcgccatcttaagtactgtgctgtacttctccaatgccataacgaattcccatcctttcaaatataaatctgataactggattttatgcaggcctacacgcacagcgaggccccttacagtgagtaaggaaccaagcacggtttataaacttgcacaaaatacaatcctatcataaatcgtttttgcggctgcgtcaattacaaagctgcgatttaatgccccacaaaggcggatttggacgaaagttagccaaaagaccggtatttatgaatatatttaggaaggcctttcccggttttgtccatttagaagagcggcattggcattgccggcctattataggcgtggtatgctgaagatgataagttggatgccgccacaggcggcaagggggaggtaaaatcatgttaaaagcgcagggcaaggattttgtagatcatggacagaagatcgttctaacgggcttcaacttttgcggctggatgcagatggaaaactttcagatcggctttccgggcgttgaacagcagtttagaggctatctggcccaatatgcgggccgcgataaggccgagcatttttttgaccggtttttgacccagtatgtacaggaggcggatatcgcctttatcaagaccatgggctgcaaccatgttcgcctgaacatcaactaccgccattttgaatcggaccaggcgcccatgcagttcaaggcggaggggttccggcatctggaccgggtgctggagctgctggcgaaatacggcatgtacggcatattggagatccacggcgcgcagggctaccagaaccccgactggcacagcgataacgccaccaataaagttggactgtttcaaaaccagttctatcagcagcggctgatcgccctgtggcgctttatcgccgagcattataaggataacacggcggtgggcggctatgaaatcatgaacgagccctgggccgaagcggatgagatcgacacgctggtagatatctgcaagcaggcgacggcggctatccgccaggtggataaggagcacatcgttttcattgaggcgaacttattcggcaagacttatgaaggcttcccagagccctgggacgacaatatggcctgctcggtacaccagtatccatatccgtcgctaaatatgttccgctatccggcgctgaatgaggggggcagcgtattctataataaggactatattgcctacgagatggatatccgcgatggatacggaaaaaaatacaacctgccggtatggatgagcgagtttggcatcgtacataacgatgatttccgtgaggataagctgcgcctgctggaggaccagctagcggtgatggatgagcgggggcacagctgggcgctgtgctgctataaggacgttgggaacatgggcgtggtacggctggatccgaacagcgcctggatgcagttcgtgaaggaaagcaatgccttgaagctgaaataccatacggattttgatcccctcgccagcggaagctgggagatgatggatgtggtcaaacatctgttccgcgcggactttaccccgggcagcggcgaggtcgaggcgcggctgcaccggcacctggcggtgtttttcggagaggagctgtgcatgcggctatgcaagcgcctggcgcagctgagcctggacgagctggataccctgatggacagcttcaagtttgaaaactgcctggtccgtgaggattggaaggcaattctgactgcgcatacaaaatagcggaatgtagacccgcccaagtgctgccggataacggcggaccgggcgggtctttttttgctttcatgatggtaattatcgtttaaaaactattgacataaaccccgctctatgccttataatgggcgttaggcgcgctatggataaacggctgataaacgcgcactctccaggcaaatgggaggaggtagaccctttcaatggcgctacactatctatggctgtttatcgccgtcatctgctttagcgtacagcttacggcagttaaagagtataaccatcgtttcagcaagggcaaggcgacgctttttcagtttcaggcgctccatctttatgtcgccagcggtctgacctttattgtctgcctggcgggcggcggctttgggccgctgctgccggcaacgctgtggtacgggctgctttttggcgcggtatttatttggtttttcttcttttatacgatggcaatcgataccggccccatgtcctttaccacattgtgcaattcttccgccaatatcttcccggtattgatcgggctactgttttggggagagattttaagcccgctgcaatactgcggtatcgctctggtgctggtcatgttttatctgggcagcggcatcggaaccaatacgggtgagaaccgtagggccagcggtaggtggctgatctatgtggcgctgatgatggtctgcagcggaacgctgatgaccctgaccaagctgcatcccatgctgaccggcggactgcaggtgccggaattttataccatcggcctaggtacggcggcgacgatcgccctgattttatcgctcatcttccacaagggaaaaggggaagcggtcaatcgtctgggcccgcgcctggtggggacctgcgccatcgcaggggtggggacctgtgcgggcaaccagctcatgggcctggtcgcttcgcagggggtcaatgcgtcgatcatgtttccatttgtcaacggggcgcaggtggtattcatcaccttgatttcgacgttggtctaccgagagcgtctgacgcgcaggaccctgatcgccctggggatcggcatcgtagcactggtactgatctcggtttagcccgatcaatagagaaatacaaaaaagctggggacaagccccggcttttttgtatccgctctctactataaagaggcgccgttttcttcgataatctttttataccagtagcccgaatccttgatgatgcgctgctgagtgcggtaatccacatagaccatgccaaagcgctcagcatagccgctgtgccattcaaaattatccagcaaagaccagtggaagtaacccttcaccggcacaccatcttgcaccgcgcgctttaaggcccacaggtaacgcgctaaaaagtcgatccggttggggtcgtgcacctgcccatccagcgagactacgtcgtggcaggagaggccgttttcggtaatgtacagggggagcgaataccgctcgcacaggaatttggggccccaataaagcgcttctggggtaatgggccaatccagcgccgttttagggaatcccgcgtagcgcggaacgaattggggtttgccgtcctcgcccatgcgcacttccgagccattgtaaatattctgcccgaagaagtccagtttctggtggatcagcgccatgtcctccggggtgatctgcggcagatagggatgatatttgcgcaggccctcctcgggataatggcccaaaatcaccggatcgctccaccagggcacgttccaagtccattcttctacatcaggcaaggcaaaacacgcctggcgcgctgcctcaatatctgcagcgctctcactggcaggatagtgcagggaggcggtgggcgcgtagccgattttgacctcgccacgggctttgtcccgcagggcgcgcacggccatgccatgggcctttaagacgttatgagccatggcaaaggtatcccagggggacattttcagccccggggcatggatgccgttggcgcagccgtgaccaacaaagacctgcggctcgttaaaggtgaaataataccgcacccggtcggaaaaatgcgctgcgataacgccggcgtattcgccaaaccatttggggctttgcgggttcatccagccgccctgctggtgcagcgccaggggcagctcccagtgataaagggtcaggtagggttcgataccgttttccaacaggcaatcgatcagctcgttgtaaaaccgcagcccgtcggcgctgactttgcccgtcccctgcgggatcaaacgggcccaattgatggaaaaccgataggccttgatgcccatttctttcatcagcgccacatcctggcggaagagatggtagtggtcgcaggcgacctcgccggtgtgcccgccaaagacccggccgggctgtttgcaaaagatatcccagatatttaagcctttatcggcctggtaggccgcgccctcgatctgatacgacgaggtggccgcgccccagacaaaatcattttgaaaacccatatgcatcctccttataccgttattctgcccagttcagtatagatttattatataacaacgatttgccactttacaataaatagaggggcgcaaaggggtgtacagtgtgtttagtaaggtgatatactggaaacagtaagaaggagggatgaacgtgatctacaatttgaagccggaggtcaaacgtccggcactgttgacgacgaccgaaatcacctatgcctatgcgccgacttacggcggcatcacctgccagccgctcaagatgagcatcgtgcgcccggccagctccgcaggggaaaggttgccggtattgctgtgggttcagggcggcgcctggaaggagagcgaccgtaatttaaggctggcagagctgggcgcctttgcgtaccggggatatctggtagccagtatcgagtaccgcgtcagcggtctggccacctttccggcgcaaattcaagacgtgaagacggcgatccgctttttacgcgcccatgcggacgcctttgggatcgatggggaacgcatcggcctgaaaggggattcggccggcggtcacctggtggcgctggccggtaccagcggggatgagcccgcgtttaaaaccgagcagtgggcggatcaatccgaccgggtgcaggctgttgtagacctttatggcccttctgacctgccgcagatgggcgaggtgcccggctttgaggatcatcacgatccggcctcgccggaatcgctggtgctgggcgggccggtacgggaaatggcgggcgccgcacgcatcgcaaaccccatcacctatatttcagaggatacgccgccctttatgatcctgcacggcacggcagacccggtggtgcccatcagccagagcgagttgctttacgacgcgttggtggccaagggcgtggaggcggatttttaccgcatcgagggcgcgggacacgccacggtagagttcaaccaacaggagatatttgatttgatcggggagtttttggataaacacttaaagtagagcgactgctccaataaaaagtgccggcgcaaacgcgccggcacttttagctgtttgggtgcgaccttatttttcttcgggcacttgtttgaatttgacgttgtccatccaaaacgccagcagaaagcctgccgcaaaaacggcggtgccaagcgctaaatccaggacgctggtaaaggaagaaggcaaaatcatcagcaccgaggagagtacaaaccccaggatgacccgtgaaagtcctgtgtaatggtgctttagcagctgatctaccccccttgaggcaaggacgatggtggccgcaaaaccgatgaccagaggaatgagtacgctaaagtccagattgccgattccctccgccatgggctggtataatcccataaaaaggaggatggaagaagaacttaaccccgggatcaccatgctcagcccccagaccgccccgcaaaacaggaaccaggcccagttaggcgttatggcgttgccttgcatgccggtatcgagcagttgaaaaaagagaaaggaagcgatcagggtgatggtgaatcctgtccaccccttatccggcccgctggcggcggattttttgatgaggccgggcaccgtgccgccgatcagccctgcaaagagcatcatcgctatgaccagggaggcgctaagaaaaccctcgactaccctggctaaaagcacaaaaccaactaaaccgccggcgatcagcgcgataaacattttgtagcttcgcctaaaggtgcgcagcggatgtaccagaaaggccatcatcggttcatagatcccaaaggccacacaaagcacgccgccgctgatgcctggtaaaatggcgccggttccgatgagaatgccctgtaaaaagaacaggagccattgccacttctttttaaattgatgcatgagagattttaacctccgtaaacgatagcataggccgttatccgcaaggcccggtcgatgcgcgagagatcagctggcaatccagaatctcgcgcctttgggggcgggcagggctgttgatgcgctcaagcagcatctgtacagccagcttgccgatctgttcatagggctgggcgatggtggtcagccctataccggcaaggccggcgtaggggatatcgtcaaagccgatgatgctcagattctcagggatggattttccagcgtttcgataggcctgcaaaagcccaatggccattagatccgtcgtacagaagatggcggtaggcgcagcgctccccaacgatagcaaatggctgcccagcgtgtgcccgctatccatatccagactccgggtcgtaaaactaaaggcctccggcagggcaacgccgcccaaagagagcgcgtgaacaaagcctgcacgccggtcgcggtgcgtggtggtatttttatcgccggaaaaaactgcaaccctgcggtgccccagcgccaaaagatggtgggctgccaggctcccaccgtgaaagttatccgtcgtgagcatatcgcccgcgaaatcgtcgatatagcggttgagaaggatcaccgggcagcccagcgcaggggcgctttgcagcagataggcctcgttggtgggggagatcacgatggccccggcgaaattatattgcgctgccaggtcgataaagttgcgctctttttcggggtcctcgccgctgcaccctaaaaacatgtggtaaccctgctgctcaagctctttttcaatataccaagtaacctccgagtaataggggttgcggatgtcggagatgatcagcgccaccaggcgggtagccccttgtaccagtcctctggcgatggagttaggctgataatggttgcggcgcaccgcatccatcacgcgccggcgggtctcatcgctgacgtgtggatcgtggttgagcacgcgggatactgtggactttgaggtccccgccaggcgggcgatgtcgttgatagtcatccgataaagaactccttgccagcaataggatttatgggaatattcccataaatctgtttttatcttattaggggaagtgcgatctgtcaatatcaccacgatagatttagtttgcggtctaccccctgcaaacagggattatcctgtgcattccgctggtttttaattgactttttgccctttacactttatagttggattatatgggagcgttcccatatcaatcgaggacaaaggagattttgatttatgaaattagttattgcttccgattttgcgggctttaccctgaaagaggcggtcaaaaagcatctgatcgaaatggggcatgaagtggccgatgtgggccagcagacgccggaaaatcaggtgatctatgtggacgcggttgcgaatttggccaaggcgatcgccagcggcgaatatgagcgcggctttgtgatgtgcggcacgggcgccggagtaagcattgcggccaacaagtttaagggcatttattgcgtcgcttgcgagagcctgtttactgccccgaagtgcgccatcatcaacaacgccaacgtactggccatgggcgcgcgggtcgttgccccggataatgcctgcgaaatggccgacgcttggttagagcagagcttttgcaaaggctttgcgccggagcgggcggaatttgtgggcggcttgtttaaaaagctgcaggccatggaagacgagaatttcaagtaaggcgggagcaggaagatgccgatggaattgtttgacctaacgggtaagtttgccctggtgaccggcgccgcccgcgggatggggcgcgcgatggcccaggctttatacgaccatggcgcgacggtggccctggtcggcctgcatgaaaccgtgaaggagacctgcgaacagatcgatcccaccggggaaagggcgctgccctttgtggcagacctggccaggcgcgaggagatcgaccgggtatttgacgaggtgctctcagcctttaatgggcggctggatattctggtgaacaacgcgggcatcaacctgcgccacccgccggaagaattccccttggaggattgggatcaggtgatgcgcctgaatcttgacgcagtctttattctggcgcaaaaggccgggcaggtcatgctgcgtcagggcgcagggaagatcatcaacatggcgtcgctgaccagctttttcggagggacgaccatcccggcttatacggcggccaagggcgctgtggcgcagttgaccaaggcgctgtctaacgattggcggggtaaggggatctgcgtaaacgccattgcgccgggttatattgcaacggacatgaataccgccctgatcaacaacccggagcgcagccgcaagatcatggatcgcctgccttgtaaagagtggggcaagccggaggatatgatgggaccggtggtatttttggcctctgcggcatcggattacgtcagcgggcacgtactggtggtggacggcggctacatgggcatgtagcgattaaacaagttttgccctgggccgatggacggtgctacgccccgtggagggtaggcgtgccgccgggagagggatcatttgtgtgccggggttccgcattgggcgggctggagccgcaaagctgtatggacgttctcctcgcgggcgcctatgcagctgtgcggtatttccgcttagagctgtgatagaggaaaggaaggccgcgatatggaaaaatttttgatcgccattgatgctggtacgaccaacacgcgggccgcgctgctggatcaggaaggcaagctgatcggcctgcaaaaggctgccgtgggcgtacgcaataccgctatcgacggggataaccataaactgcgcgaggcggtcaagggctgcattaaagccctgctcaccaaccgcgggctgctgatggcggaccttggcggcatcgtggccagcggaatgatcacctcaaacgtgggtttggtggaggtgccgcacatatgcgcgcctgcagacgccaagaccttggcggagaatgtgcgggcaattaccctgccggaggtgtgcgattgccctatttggtttatccccggcatcaaaagcgctcaggggcctatcggccttgataactttgaggatatggatatcatgcgaggcgaggaagtagaaagcgtggctgtgatcgcccagctgcaccggggagatcccatgctgctggttttaccgggatcgcataccaaatttgtggcggtggatcgtgcaaggcagatcacaggcagcctgaccaccatcgccggggagctgctcagcgccatcacacaggataccatcctggccgatgcggtaggacgtcaatttgttgcgcccggagattacgacccggagctgatggcagccggctataaagaagcggaaaaatatggccttggccgcgcggcgtttctgggccggattctcaaccagtttactattaaggataagacaaagatcgccaattatatcctgggcaccgtggtccagggcgacgtgcgggcggcagagcagtggttgaaaggccgaggcacggggcacaccgtggtctgtggtacgggcaccatgagccgggccctggctgatgcgctggcaatggacggcgaatttggagaggtcgctatgtttgatggcgatggagagctgccgctttctaccatgggggcgttggagatcctgcggcagggaaactatatttgaggtaaccgcctttacaatcgggccgccaaagctctggcggccttttcctgtgcgcggggctggcggcgcaggcagatttcgggtataataatactgcacattttgtcaaacggtaagggtagggagaattttgagaaaaaaacgggttacatcatcggatatcgccaaagctgtgggcgtatcccagacgacggtttcgatgatccttaacaaaaagtacaatacctctttttccagggcaacggtggaaaaggtggagcgcgcagcgcaggagcttcactatcaccggccccgccggcgcactaaaaagacctatacggcgcaaaagctgctgatggtgctttgcccttcgctggttaacccctattatacgacgttgatacagggcgtggaagaaggcgcgcgcgagcatggttacagcgtgatcgtctgcaacaccggcagggtgcgcaaggcagaggaggattatctcgaaaggatcgagacgctgcgcccggccggcgtgatctatatgtactatccattgtgccagcggcgtgcggaggccctggcgcagcgctgccccttggtgctggtaggggcgcagggcgagcttgaacatatcgatgcggtagcgctggacagcgccaagaccggtagactaatggccgaacacctgctggagctggggcaccggcgggtggcttttatctcgacgcatatcgaatcccagcagcccgcgcggctgcgccgtgcagagggatttgaagaggcgtttaaggccggcgcgtcggaagggcgcgtactggtcaaggtgccgcatggggaaggggattgcctggatgacgcgcagcgcgaataccgtaccggctatgagctgacccgtgagctgatggcgcaggacccggatatcacggcgatcgccgcgctgaacgatatggtcgccctgggagtgctggatgcgctgttgcagctgcattataaggtcccgcaggatatatcggtcatcgggtgcgataataccatgaccgcgcgcctgcaaagcgtgagcctgacgaccattgaacatttttccctgaataagggacgggacgcggcggacatcgtctttaaaaaactgacgatggcgggcgccgatctgccgggcgaccttgctgcgagcaactaccacgtagagtatgaaccctatctggtgccgcggactaccacgggcccggtgcggattgccgaaaaataagttttggagcaaaaattattattaaaaaaagcggcgtaccttgcgcacaggtgcgccgctttgctgtgaatgggatattggggataaatttatgtcacgctccaggcgaaattattactaataattgctgccgaaaaccgattttattaagcggccaaatgcaacatgtgctatgataaggctaaccaataggagggggatggaatgatggaaaagggccttcaactggaacagtatttaaaccgtcaatgggcttgcagctgcggaaaaacccacgccacacaccttaaagccgtagcgattcgccctggcgcggtaaacgaggtgccggagattttaaaaagcgtgggctgcgcgcggcccttcgtattgtatgatgaaacgacttatcaggcggcgggtgagcttttacaaagcgcactggaaggcgcgggcgttgcttatacggcctatatcctgccctatgcggagccggtcccggacgaaaaggtgctggggcagatcctatttaattttgacccggcttgcgacctactgctggctgtaggaacggggacgctgaacgacctggccaagtacgtcagctttaagatgcgtaaaccttatgccgtggtggctaccgccccttcgatggacggattcgtttcctcggtggcggccctgatggaaaaccacatgaaggtgacctatccggcgcatgttccctgcgcggtcatcggggatacggatattttgcaggcggcgcccatggagatgatcgcctccggcgtgggagatattttaggtaaatatacctgcttgtgcgattgggccatggcccgcgagatcgaaggggaatactactgcccggagctcgtggcgatcatgcgccaggctatcgactatgttgtgcaactggtgccccgggttccggcacgcgatccggaagcgattgccggcgttatggaggcgctggtgctctccggcattgccatggcctttgcgggcaactcacggcccgcttccggcagcgagcaccatttatcccactattgggagctgcagttcctcgcgcaggagcgcaaggccgtactgcacgggatcaaggtaggtatcggcacggtagcggtattgcggatgtatgagtggcttttcgcccgtaaaattgattttgaggccgcaaaggctggggcgctggcctttgacgaagaagcttggcgcgagcggatgcgcgcgctgtacggagagggcgcccaagcggtgttggacctggaagcggctacccacaaaaacgggccggaggcggtaggcgcgcagctggatgctatggctgaaaagtgggataccctgcggaagatcgccgcccagttgccgccaagcggggagatcgcccggatcctacagctggtgggggcgcctgtggcgccgcagcaggcaggggtggataagcagatgtttgccgatagcgttgtggcggctaaggagctgcgcaaccgctttggactgctgcaaatgctctttgatctaaatttgagccggcaggcggcacaagcggcgctagaaggcccggaaagctagtatagacggccacacctaaaagagctctctgtataacagagggcttttttaggtatatgatgaggatagccggcattttatccagcgggaatagtgtttggaaggaacggccgacggggataagggagaatacaccacttgattgagaaaaaacgagaattgccataatgaataggctaaccgctttagactgataggaacatcgtgtataataagggtaaagagcggcttaagcgccaaaaagagataaatgaagggccgatggcgacgcgccgtatacagtgtaaccttggctattcaaataaaaatatgagggggaaaaacaatgcggcatattcaagatatgcgcgtgagggatccgtttatcctgacggacaaagagaaagggtgctattatttgatcgccagcgaccgcctggcgcggaccgacggcaggcccggagagggtgtggattacctgcgcagcgaggacctgatacactttgaggaacccaaagccgcctttcgcccggatgcgaatttcttttcgccccaccagttctgggcgccggaggtgcacgcgtacaagggccggtattaccttttcgtcaccacctggggccgctggggtgaggaaccgattgacaccgacgtattgagcgagggggagatacgcggtacgcagatctttgtagcagacgagatgaccggcccttatcgggagtggtcacatggaccggtgaccccgcgcaaagatctgacgctggacggaaccttgtacgtggcccccgatggaaagccttacatgatctattgccatgaatggcggcagatcatcgatggaacgatcgtggccctgccgttgacggaggatctgcgggctgccgcgggggagccggtaaccctgtttaagggcagcgatgcgccttgggctacgggagatttcgtggaaacctatgagaatacgccttatcacaaggtcatttatgtgacggatgggccgtttttgtttaacgatctgtccggtgggctgtgcatgctttggagcaccggcggcgagggcatttataccaccggcatatcccgcagccccagcggcaatgtcctgggcccatgggagcagagcgagcaggccctgttcactggggacggcgggcacgctatgctgtttcacaccctgcaagggcagttgatgcttgcgctgcaccagcccaacggcgccccggatgagcggctgcgcctattcccggcccggctgacggagacagggctggcgctggagcctgcacttgcgcgcggataagggaagaggaaactgcccggccaagaagaggaaacggtaaaggcaggcatgcccataccggagttttcagctggggcccctggaaagcgcgcggctgtgcaaaagaaccgggcataatccaaatgcatataaaaagggcggaaggggttatcctttccgcctaattatccccctaaattgtttgtcccggtgggatgtaatttggctggcgaccgtggtataataaggttaaacgttttaagcagacggccaatggtcgcctaatattgacaggaggggaaagaaatgtccgtagcacagtacgtaaaggggctggcgcactttggcctgcctaccaacgacattgaaaagaccatcgctttttacaaggggttaggctttgaggtggttcaccagcccaagcccacttgcgcgtttttgcagctggccaacgtccagatcgagacctatcagaccggcaccgcccctgaggccatcggcgctatcgagcatgtggcactggatgtgtgcgatattgacaagacctatgcggagatcaccgcggctggccacaaagtggtcagcgatggcgtgcagcagctgcccttctgggagaatggcgtgcgctttttcaccatcgaaggaccgaacgccgaaaaggtagaattctgccagaagctgtaagggtattccctgggaaatatgcggttataaaaaagaagctatgatgcgcatagcttctttttttattgtggcaatctctattgcgcgtaaagggcacttagctgaacagccaatcgataccgccaggctcaagccccttggcgcgcaactggtcgatcagggaggagaggatctctgcatccatatcgatggtgtgcagcaggatgatgtccccatccttgacccgctcgaggatgtgctgcaagcgggccggcgcggtcttaatcttgcagtcgttagggtcgaccgaccacatgatcacaccggaatagttcatctgcccggatacggatagaatggtttcggactccttaaagccgccgcagccatagggcgggcgcataaagcgaagggcgggggcgctgcccccaagggctttttgcagctgattttccatcccctgcaactcgctgcggataccggcagcatccagtttatccagacggggatgcgtcatggtgtggttgccgatctcatgcccctcggccaccgcgcgctgccatagcgcgtgattttgccccagagcctgtccagtggggaaaaaggtggtatgtacgtttttagcccccagcacgtccaatattttggtgatggcgctggaatgatacccatcgtcaaaggtgatcgccacccgtccccggccgcgcggcccatggaagaccttaatgggggcaccggcggtaaaggtggaggtgccgccgcccgaaggcgccgggggagtaggggtaggcgtcggcgcgggcgtgggggtaggcgttggaagcggcttatagtccatctcaaaccggacgggcttgccacttttaggggctgtggagagcgcctccagcttctttagcggttggcgctggctggaaaccagggccagatactgctggcgcataccggaatcgaccctgccggcgctgctgggctgaacggcggcggggatggatagaaaagtcaaagtcagcacaaacagcaggagcgggatgacccgaaaagccgtttttttacggtgcttgccccggcgggggcgcgtagcgcggggaagtttttcattcgtatgcagcatagactttcaaccttttcattcgtattcatttaagcatgcttacagcctgagtataacatgcttcgacaacattcgggggattatgacggaaacgtgataaatatttaacaggtgtaataggtgtaaaatttttgcagctaaaccgcctgctttgggtataaaaaagagctgccctaaagggcagctcttttgaacgggtaatttttttattcagataggctatccagccatgtgcgggctgcgtcaatgtgggcctttacgctttgcggcgccggcccgccgggcaccttgcgctcgcgcacacaggtgagcagcgatacagcctcgaacacatcttccccaaacagggggctaaagctgcggaactcctccagcgtcagttcgctgatggcgcgacccttttcgatgcaataaaacacgattttgccgatgacctcatgcgcctcacggaaaggcagtccctttttgaccaggtaatccgccgcgtcggtggcattggtaaacccgccgcccgcgccggcgtgcatccggtcagcgttaaagcgcagggtggagaacatgccgcaaaaaacctgcaagcatttgatgtaggtatcccgcgcgtcaaaaaagttctccttatcctcctgcatatccttgttataggcaagagggatccccttcatagcggtcagcagggccatcagatccccaaacacccggccggacttgccacggatcaactccgccacatccggatttttcttctggggcatgatgctcgaccccgtggaaaacccgtcgtccatctccacaaactggaattcgttgctggaccagagcaccagttcctcgcaaaaacgggacaggtgcatcatgccgatggacacgcagctggcaaactcaatacaaaaatcccggtcgctcaccgcatccaggctattggccgtgatggcggaaaagcccaaaagctgggcgacccgctcgcggttcaaatcataagtggtaccggccagggcaccggcgcccagcggcatcacgtcggcgcggtcataacaatcctgcaggcgggtgatatcccgcttgaacatctcaaaataagccatcaggtggtggcccagggtgatgggctgcgccttttgcaggtgggtatagccgggcatgatggtctccaaatgctgcgcggcggtatccaaaatgcactggcacagctttttcagttcggtcacagcttcgcgtatgctgtccttgcagtacatacgcatatccagcgccacctggtcgttacggctgcggccggtatgcagccgcttgcccgcctggccgatgcgcgccgtcagcagcttttcgatattcatatggatatcttcggcatcgatctcaaagtcgaccttgcccgcctcgatatccgataagatacccttcagaccctggcagatcgcctgcgcatcctcctgggggatgatcccctgctcgcccagcatggtggcatgggcgatgctgccggcgatatcctggcggtacagccgccaatcaaaggagatggaggagtggaagtcgtccaccatcgcatcggtctgtttttgaaagcgtccgccccaaagcttcatcttacttgtttcctttcaggttctccatcatcagcgcgcgaactttaagcggcagaccgaacaggttgataaagccttcggaatccttctggttatagacctcgtcctcgccaaaggtggcaaactcctcgctgtacagggaatagggggatttgcagcccgcgggcaagcagttgcctttgtacagcttcagccgtaccgtgccggtgacggtctcctgggtggagtccacaaacgcagccatggcctcgcgcagcggggtgtaccagcagccgtcgtagaccagctcggcatagcgcacggccatggtctctttgtagtgctgcgtggcacgatccagcgtaaggtactcaagctctttatgggcggcgtacaaaatggttccgcccggggtctcgtacacgccgcgggatttcatgcccaccaggcggttttccacgatatcgtcaatgccgataccgttagccgcgcccagggcgttgagcttatccataatttccagcggcgagagcgcctccccgtcgatcttgaccgggatgcctttttcaaactcgatttccacgtaagtgggggtatccggcgccttttccggcggggtgcagatcatatacagctcgtctttcggcgcattccagggatcttcaagatccgcgccctcatggctcaggtgccacaggttacggtccatggaataggggcgctttttggtgaccggcacgtcgatcccacgggcctgggcgtactcgatctcttcctcgcgggatttgatatcccagattcgccagggggcgatgatcttcagatgaggcgccagggctttgatggtcagctcaaagcgaacctgatcgttacccttgccggtacagccgtgacagatggccacagcgccctctttttcggcgatctccaccagacgtttggcgatcagcgggcgggcgatggaagtacccagcaggtatttgccctcgtacaccgcgccggccttcatggtgggatagataaaatccgtcacaaactcttcgcgcagatcttcaatataaatcttgctggcgccggtacggatggccttttcgtttaagggctccagctcttcgccctgccccacgtccgccgcaacggcgatgacctcataatcgtagttctcttggagccacgggatgatgatcgaggtgtccagtccgccggagtacgctaagattactttttcttttgccatagcaaaactcgcctcctaaatattgaacgggcgcgcgcccgttttcgttaaattttatataattatacataactatgattacttatgcaatagcggaagggaaaattcttgtgacgattttatgaacggccgcttttcccgcgttgacaagcttttgcaaaaagcataagattactatagcaaactgggcggggattatcaattccccaacgggtaaaaaacgcgggatggagggcttttttgaggattttagggatcgacccgggaattgcgatcgtaggctacggcgtgatcgaatcccagggttcaaggctaaagcatattgaaaacggcgtgctgaccacgcccgcggggatgccactgccccagcggctggagcaggtgtataacggaatgaaaaagctgctgatgctctttcagcccgaggcgatcgcctttgaggaactgttctttgccaaaaacgccaagacggccatcaccgtaggccaggcgcgcggcgtggcgctgctggccgcagcccaggagagtgaacagctttttgaatacacgcccttgcagatcaaacagggcgtggtgggatacggaagggcggaaaagaaccaggtgcagcagatggtcaaggtgctgctgaacctgccggatatccccaagccggacgacgcggcggacgcgctggcggtggccatctgccatgcgcacagcgcaaacagtcagcaactgttcaaaatcaagtaatatttatataaaggaaagtttatgtacgcatttattgaggggaaaatcgaagaaaaaagtttggattccatcgtcatcaacgccggcggcgtggggtatctgatcatggcgacggcttcggccattgccgcggcgggcccggtgggacaaaaagcgcgcatctatacctatctggccgtgcgggaagacgccatggtgctctatggctttgccagcctggaagaaaaaaagatgtttgaccggctgatcggcgtctcgggcgtagggcccaagctggcgctggcggtgctttccaacctgacggtgagcgacctggccgtggccctggtcaccggggacgcggcaaggcttagcggtgtgccgggcgtggggaagaagacggcccagcggctttgcctggagctcaaggaaaagatcaacaacgaagagctggccgccaccgccggtgaggcggcgcccgaggggatttccagcgcgaccgtagagggcgaggccgtacaggcgctgattgcgctgggctatcaaagcgcggaagcggccaaggccatccgcgccctggaaggcaaggcagaccgtgtggaggatctggtgctgctggcgctgcgcaggctggacgggcgcgcaaaatagcggttatcaatttaagggagaagcaagatgcaggaagaggatcgcattatcagccccgggctgcgggaggacgacgaggcggagtacagtctgcgcccgcgcagcatcgaggaatatgtggggcagcaaaaggttaaggaaaaactaaagatttttatcgaggcggcgcgcaaccggcacgaaccgctggatcatgtattgctgtacggcccgccgggattggggaagactaccctggctaatatcatcgccaatgagatgggcaccagcatccgcgtgacctccggcccggccatcgaaaagcccaaggatctggcggggctgatcaccaacctggccgagggagacgtgctgtttatcgacgagattcatcgtcttaaccacagcgttgaagaggtgctctacccagccatggaggattttgcgctggatatcatgctggggcagggccccagcgcccgctcgatccggttggacctgcccaagttcacgctggtgggggcgacgactcgcgcgggtatgctgaccgggccgttacgggatcggtttggcatcaccaaccgtctggagctttatgatgacgaggatttgagcaccatcgtgcggcgctcggctaaaatactggatatttccattgagcctgcgggcgctacggagatcgcccgccgctcccggggtacgccccgcatcgctaaccggctgctaaagcgcgtgcgggactttgccgaggtcaaggccgacggggtcatcacccgcccggtggccgacgaggcgctgaacctgctggaggtggatgcgctgggcttggaccagacggaccgtaggatcctcgaggccatcatctgcaaatttggcggcggcccggtggggttggatactttgggcgctaccacgggggaggagacctccaccattgaggatgtgtacgagccgtacctgatgcagctgggctttatctcccgcacgccgcgggggcggatatgcacggcgctggcctaccggcatatgggttatgtggccccggatcatgtggaagagcgcacgcagacgactttattagcagattagaaatggagagcgacgcctttgaataaaagcgatttttattacgacctgccccagaagttgatcgcccaaaaacccatggagccgcgggacgcctcgcggctgatggtggtgcaccggacgcaggatcgcatcgagcaccggcatttttacgatatattggagtatttgagccccggcgacgtgttggtagtcaaccatacgcgcgtgatccccgccaggctgtacggccgaaaggtgggtaccggcgggaagatcgagtttttactgctcaaacgcctcagccgggacgaatgggaggtcatcttaaagccgggcaaaaaggcgccggtgggggcgcgctttgaatttggcaacggagagctgctggcagaaatcatcggccatgcggacgagggtggacgcatcgtgcgctttagctacgaaggcgtgtttgagcaggtgctagagcgcctggggcagatgccgctgcccccctatatccacgagcagttggaggaccgcgaccgctaccagaccgtatatgccaagtacgatggttctgccgccgcgcccacagccgggctgcactttaccccggagctgctggataaggtgaagcaaaagggcgtcgagatcgtcccgatcctgctgcacgtgggcctgggtaccttccgtcccgtcaaagaagagcatgtggaagaccaccatatgcacagcgagtattacgaggtatcgcccgaagcggcagatcagatcaatgcagcgcatgcccgcggcaataagatctttgccgtggggaccacctccgtgcgcacgctggagagcgtggccgatgatgcgggcgtggtgcatgccggcagcggatggacggaaatatttatcatgccgggctataagtttaaagcagtggacgcgctgatcaccaatttccatctgccggaatccacgcttttgatgctagtcagcgcttttgcatcaagggaacagattttaaacgcttatgaaattgccgttcaggagggataccagttcttctcgtttggttcggcgcagctgctgctataaatattgatgttgtaaaaataaaaggctgggtacctaaccggtacccagccttttgaatttcagaaggaatgaaacgggaaattctagttcacgcagatcagctcatactcccggctgcctacgcctaacgccgcggctgcctcaacggtgtgcacgccgttacgggattcgatccgctcgatcagatcggccttgccgggatcctccgagctatagaccaggtccagacaagcctgatccagcgccaccggatccagcgaagagaggatgccgatatccccgattttgggatcttcggcaacggcacagcaatcacaatccaccgacatattgcacatgacgttgataaaggcgatcttatccttaaaatagtccatgattgagcgatctgcatcggccatagcttccaggaaagaatcgtggtcggccgtccaaatctcctcgggcttgccggcgccgtggatatacgccttgccgaaggaagaggcaataccgatggagatattcttcagcgcgccgccaaagccacccatgggatgccccttaaagtgggaaaggaccaacatcgaatcgtaattggccaggtggccgcccacataattggtcttgatgcgcttgccggagggaatgggcagctgcatgtcgccatcttcatccagaatatcgaccgtggcgatctgcgtccaaccgtgctgctgcatggtttcccaatgcgctttggtgttgttgcgcttgccgtcataggccgtattggattcggtgatggtgccctgcacgtaatcgacgatgggcttcataaaatccgggcggataaagttttggttgccgatctcgccggagtggactttggcggccaccttcccgggcaattggacggataaaacgtcaaacatcttgatcatggcttcaggcgtgatcgctttggtaaaatagaccttggatttttgcatggcgataatctccttttacgtaattttatttttaagtttgcaagggtttcagtgtcaaccggccgcacttagccgcagtacgaattgatgatgggtaacaagatacgtaaagtattatagaacttggactatactctaagtcaactactttaggcatttttgttatgcaaaattttacgctttttgtagattcaatctaaaaagctggcactttaaaatgacggacttagaacagcgctcatctgcactttaatacacagtcaaggtaaaggcaaggtgtgagttcccctttatcggtagtcggctggaatatattagaaataattgctataataaaaccagttttccatgtgtatggggcatgccaaatgccccgataagtgccgtttgcatcaaatgctgattaaaaccagacgcggttaatatactactacggaagcggaaggtgcggcggtactaagaataaggaggcaatgtatgtattcaaaacaatcggtcgtgcgattggcgatcgtgctgatcctcgcaacggccatattttcggtgggtgggacggtgctggtcagcagtattttgcagttatccggcgaacaggtggcagtcagcgcggacgagtacgcctcgatcgagcgatttgcgcgcctggacgatgtataccagcgcattatgaagaattactatgaaaccccggatagcgaaaagctgatcaacggagccataaaaggaatggtggaaggactggacgacccttattcgcgctactatacgcctgaggaatacacggagagccaacaggatgcagaagggctgtattatggcataggcgtagtggtatctatggataaggatacgcatcagctcaacatcatcaaagtctattcggatacgcccgcacaggaggtagatctgcgaaagggcgatgtgatcgcctccgtagatggggcggatttgagtggaatggagttaaacgaaatcactgcgcttattaagggcgaggagttatcccaggtgaagctgacgattttgcgggacgggcagacccttgaaaagacgttgacccgccgccaggtcacggtggaccgggtagagtggcacatgatggtggataacatcggttatatccagatctccgagttccgcggcaatgtcctggaaaagatggaagcggctatcgccgagatgaaggacaaaggggcaaagggcatcgttttggatctgcgggataacccgggcgggatgatggatatcgtagtccccattgcggatatgctgttgcccgaggggctgatcgtctacacagaagatgtgaacggcaaccgccgcgaggaaaagagtgatgcagaaatgctgggcctgccgctgacagtccttatcaacgggaattcggccagcgcctctgaaattttagccggcgcgattcaggactatggggcggggacgctgatcggcaccactacctacggcaaaggcatcgtgcaatccatcatgccctataaggaggatggcgcggcgttgcagatcacgacctcgcgctatttcacccccaatggacggaacatccacggcgagggcatcgccccggatattacagtggaaatgccggaagagttgctgaagaatccccaggatcttacagaggagaacgatccgcagctgcaaaaggcgttagaagtattaaaatctgaaatcaaatgataaaggaaagcggaaatggataatttggccgccctgcaaaggcaggggatgatcggcggcatggcgctgtggatggcgctgatcggatggatcgtgatccgcagcgcctggcggcgtcaaacatccttggaacgcgcgtttttagaggaagcgcgcatgaacagctggcgccgggctttgtgccaactgctgcccggcctgggtgcgggggcgctggcttcgctgttgatgggatggctggaaatagaactcgatatttcccaggccatgttcttttcggccgcggccatcatactgtccctgtttcgcgcatttcgctattgcggttacctctatggcggggcgctggtgcacgccatgtcctatagcggggccacggcgtatcagcccgatgcagtggttttgatatgcgcggtcctttgcttttgtgagggagcgttgtgcttggctacggcgcagtttaaccgcatcccggtcctgcaggatgcggggcacagccgggctggcgcgggctgcgtagcggatattaactggccggtgccctgcctgattgggctggcgggcggcgggctggggccgatgctgtttataaccggcagcttttaccaaggggcgcttaccccataccggggaaggatgcaagtcaggggagttgtgcaggcggcggggggacttgtgctgctgttgttggccctgtggctgcgcgcacaaccggtggcgctgtatggcctgcatgtggcgttacttttgctggtagaaggtgtgcaatactatacggcacatgcgccggtgttgacagaggcagatcttccgccgcgcagggggctgcggatcctatatacgctggaaaagggcccggcacgcaaaatggggctgaaaacaggagatgttttgctggaggtgaacggacgcgcggtcaacagcgagcggatgctaaaggagatcttggcgcccgccctgccggtcgtctgggcgaagtggcggcgcggggagcatgagatggaaggcgaacagcatagctataaagacccgtatgaggatttgggcattatcgccctgccggtacagaccgggcacttttaccgccaggaggcgggcggcggattgcttaacgcgttttttgcctggctgaaccagcgcagaagcgtaaagaatagatcaaaagaataagggaggaagtttgttatggaaaagagaatcggcgtggtgggaatcgtagtggaaaatcgggagaaaagcgcgggctatgtcaacgagatcctgtcggactatggggagatgatcgtggggcgcatgggcattccctatcataagcgcggcgtttcggtgatctccatcattgtggaaggctcggtcgatcagattcaggaggtgcgccaaaagctctctgaggtgccggaggtgactgtggaggcggcgctgacccgagagacctttgacgattaaaaggagagatgaaccctgatgcaccagcatagccgggcagataacaaaaagaagatacaatgggtaacgcgcacggcgctgctgctggcactgacgttgctcttccaaagtctacggctgatctttccggggataccggcgggggtcaatcaatttttggtagggacgctggtcaatctgtgtctgctgctggccgcgatgctggcgggggcctggtcgggcgttgcgatttcggtgatcgccccggtcgtggcgtttatgcagggcggcgcgccatttatctggatggtgccgctgattgccgctggcaatgcggctttggtgctgggcgcggttttgctggggcgcaaggcagcctgggtgggcgtggcgctgggggcgctggcgaaattcgtgatcctttactgggggatcgtagccataggtattcccatgttcggcgtgccggatcaggcagcggcgcttctctcattttcgtttagctggccgcagttggtaacagccgcgctggggggcgcgcttgctctggggataagaccgttgctaatgcgcgcattggaagtggacaagtaaattgcggaaactgttaaggaacgctgaaggcctccctgttatagggaggccttcaatatatttacgccacggccggctgttagccgtacgggcggaacggagggggcaacagtagcctatgtttttgcgggggcgaaggtgacagaatttgcgggaattcgtcatatactagggtaagaacaaggcatttataaatccgcgggaggggtaaagatggctaaccgtatcacaaattcgcaaacccaatgggagtgggaaaagacggcgtatagcggcgaagaagtaagccgggataccctttttcagggtattttgacgctggcagcccgcgaacaggcgaaaagggaggatcagcaggagatcctcaggctttcccgggcgctgtatccgctcttgcccgcatgccaacaggggcagctttgcagaatcttgcaagccttggggatcgcctttacgctggaatagggtcagccaagctgcccggcgatccgccccacggccagcaggcactgctcgatctcctggcgggtggtcgcccaaccgacgctcaggcgaacggcgccctgattctccgtgcctaagaaacggtgaaccagcggtgcacaatgcatgcccgcccggcaggcgatgttgtaatcccggtccagcagatcggccacctcgccggaatccacttgacctagattaaaggcgacgacgccggcccgcccggccagcccctccggcgtatagacctgaatgccggggatatcccgcaacccgctggccaaaaggtccgcatggaaggcctgctgggcgtgcagctcgtttgcatgagcctgcaaaaagcgtatcccggccagcagcccggcgatacccggtaggttcagcgtgccggcttccagacggtcgggcatatcctccggctgtagcatcaactgtgattcggagcctgtaccgccctggcgtataggttcgagcatcaatccctcccggacataaagcacgcctgtgccctgtggccccagcagccccttatgtccgggcatggccacaaggtcggcctggagctgtcccacatcaaggggcagatggccggctgcctgcgctccatctaccagacagagcgcgccgtgggcgtggctgagctggacgatctgggatacgggctgaatacgcccggtcacgttggaaacgtaattgaccacgacaaggcgggtattggggcgcaggacacttgcgatgtcctcgggatggatgcgtccatcctcccggggcgcgaccaggctcaggctgatctgcccccgtttttccagggtgtgcagcgggcgcagcacggaattatgctcgtaataggtggtgaccacgtgatcccctgcgcgcagtaccccgccgatagcggtattcagcgcatctgtacagttcaggcaaaagatgatctggaacggatcgggcgcgttgaggtattgggcaagggcctcgcgtgcctgcatcaccaggctgccggcggcgatggagagccggtggccgctgcggccggggttggcgccgcaatagtgcatggtgttggccacggcgcgtactaccgcatcaggctttggaaaactggtggccgcatagtcgagatagatcataaaggttcccccttcacagtttaatgatcggcttcataagctatattattcgacggacggcgggaatgcgccgtaaaaggggaggaatcgtaaaaatgattagagatcattatggcctggcggcgttccgctctcgccagcaggcgatctattttgccaaccagctccagcgcgctggggtgcgcgcctctacggtgaatacgccccgggaggtatcgctgggatgcggaatatcagtacgctttgaccctgcacagatggccagggcccaaagcctgctgcgccgcaccaatccgacgaccctgatcggcctgtatgacgcgacccgggacgaacgcagcgtggcgctcaaacgggtcagcacctccagcttttagcaggctggcagggggttgaagttgcgccctcttttgccgtatactatacttaaatgtaagatacggaggaaaaggggaagatgaacgaggcgcagcgctataaagcgatattggatacgctggcaaagacctatccggacgccaagccgggcttgcacttcagcagcccgtttgagctgctgatcgcgacgatcctttcggcacagtgtacggataaaagggtcaaccaggtgacgcaggtgctgtttcgagattatccggatgcccaggcgatcgcacaaatgccatcgaacgtgctggagaattatatccacagctgtggcgtatataaaaataaggcccgcaatatcctggccacctgcaagattttggtggagcagtacggcggacaggtccctaagaccatggaggagttgaccaaacttcccggcgtcggccgcaagaccgcaaatgtggtgatgagcaatgccttcggcatcgatgcgatagcggtggatacccatgtgttcagggtttcgaaccggctggggctggcccatgccgccaacgtggaaaagacggaagaagacctgatgcgcaatatccccaaagagcagtggtccatcgcccatcactggatcattacccatggccggcaggtctgctcggcccgcaaacccaagtgtgaccagtgcccgttgcaggccgagtgtgaatactacagcgccgcacaacaggcgggttaagcagcaaatgtaaggcataaaaagcaggttggccctgagggggcgaatctgctttttttattagcggccggagttttggttccaaacagtttgtttttcggggcgcgcatgctataatgaaaaaactgcaacacgcggtaaatcctacatttaacgcataatcctgccccgaaatagaaacctaggggcagatggataaagacgcgcaagggcgtaaggagacgaaagatgtttgtagataaggcgaagatcatgatccaggcgggtaagggcggcgacggcgccgtggccttccaccgtgaaaaatacgtttcccgcggcggcccggatgggggcgacggcgggaatggcggcagcattatttttgaggcgaaaggcaatatgcatacgctgctggacttccgctatcaccgcaaattcaaggcgaccgccggagaaaatggccgcggcggaaatatgagcggcaggcggggcgaggatctggtgatctacgtaccgccgggcacggtcgtcaaggatgagcaggggcggatcattgcggacctgttccgcgagggagagcggcgcttggtgctgcgcggcgggcgcggcggcaagggcaacgcccggtttgccacccccacccggcaggcgccgcgctttgcccagccgggcgaaaagacggtggaatataccgtaacgctggagctaaagaccattgcggacgtggggctgatcggcttccccaacgtgggcaagtccacgatactctccgtggtttccgccgcgcggcccaagatcgcggattaccactttaccaccctatcccccaatctaggggtggtaaaggtggactcccgctcttttgtcatggcggatatcccgggcctgatcgagggggcacacgagggcatgggattggggcacgactttttacgccatgtggagcgcacgcgcctgctggtgcacgtgatagacgtgagcggctgggaggggcgcgaccctgtggaggattttaaaaagatcaatgctgagctgacccagttcagcgacgagctggccggccgcccgcagatcgccgtggccaacaagagcgacttgccggacgccgacgagcactttgaagcgcttaaagcccacctcggtccgttggggattccgctattcaagctctccgcggcgacgcaccagggctttgaaccgttgctgcgggagatcgttcgccagttggaggcgctgccgccggtgcacaattatgtggagcaggagcgagagctgctgccgccggtcaagcgggagctgcagatcaccccgcttgaagcgttctatctggtggagggcgacgaggtggagcggctgatcggccgggtgaactttgaggactatgactctatccagtacttccagcgccagctgcgggacatgggcgtgatcgacgcgctgaaggccgcaggcgcgggggaaggcgataccatccgcatcgaagagatggaatttgactttgtagaataaaggcgtaaggagtaaaaagatgattaccagtaaacagcgcagcgctttacgggccatggccaacgacatgcagcccatttttcagttgggcaagggcggcattaccgagaattttatcaaacaggtggacgaggcgctggaggcccgggagctgatcaagatcacgatcctgcgcaattctgacagcgatgcgcgtagcgcctgtgacgagctgtgcgcggcattgggcgccgaaccggtgcaatcgatcggcaataaatttgtgctttaccgcgccagcaccaaaaatccggtgatcgagctttagcctagttggcgctgcggcccgggtcgccctggcggccgttgaaggtacacaccgccgccaacaccacacagaccccggcgatgaccatgtaataaataccgtagcgcgtcatcagcgaaagggcaagcagcacgatggcgctggtcaaataccgcttggcgtggatgggaaggaagaattcgccccggtctggatggcggcgcagagcggccaccttgagcgcgagcagtttatcccattcttcatcggtcaaagtctggccctgcttttgcagataggcggcaaagtccttgccgttaagcaggccgatgccgctggcgctgaggaactctatttgctcggacgagagggcaaaaccatccaggccgatcatataaccgtggcttgcgccagagcggcgataggcatggaaggcttgggcgcaggcctccggcgtcgccttttgtccgggcagggtcgcggccaggtgcaaaaatacggtgttttttcccagcgtgcccatgacagcgcctgcctgattgcaaaggccgtcaatctgggcggcagacttgagccagggcagggcctgacgaaaaaagtctgcctcttggagaaggcgaaatcgtgccagcaggccctcgcgttccagatcttgcaccagcgtttcttcgcgggcgcgcaggcggatcgcgcgaaaggccagatgcaccaggataaaacccgccaggatggccagagcgccaagggcggatgagatgatgcgaaacgtcctgaaaaacaggatgatatagctgacggccagtacccccaggtacagggcgatccggtctatcgccagcccgaggcgggatttgccccggttcagcgagtgacgggtcaggatggccagcgcttttttgtcggacaagtgagtcacctcccataaatgcaagtatggccaaagtgacccagatttatccaaatcccctatcgccaaatgcgcaaattggggtataattgcagtataaagtgagatggagcaagagcatgaacagcgatttggctcaacatcgcctggggatcatgggcggcacctttgatcccatccataaagggcatattatgatcgccgaatatgccaccaaggcttttaacttggagcgggtgttatttatccccaccgggcgccccccgcataagcgggagatacgcctggcgggcggggaagaacgcctgcaaatgtgccgcatggcggtcaaagggcatcctgattttgtcgtagacgaccgtgaagtgcgccggcagggcacgacttatacggtggataccatgcaagagctgcataaggcatacggccctggctggcagttttactttatcatcggcacggataccctgcaggtgatcgactcatggcgctgtttcccgcaggtggccaagatgacggagtttatcgccatctatcgcccaggggatgagcgggaggaactgacgcgctgcgcccagcgcctggagcggcaatatggcgcgcgtatccactttggcgcgtatgaaggaccggatatctcatcgacacaggtgcgcaggcgcgtcgcttcaggcggggtggtggacgaatgggtgccggatgcggtggattgctatatccggacgcaccagctttacaaggagacggaggacggaaacaaaacgatggattttgacgcctggacggcacggttaaaggcaatactcagcccccaacgctttgcccataccctgcgcacgcgggatatggcggtagaattggcgaaacgatatggggttgatacggataaggcgcaggcagccgccctgctgcacgattgcgccaaggagatggatcgcgcgcagatgctggatgtgatcgagaaggcgggcatgcaggtcagcggtgaaacgctggagttttgcaggcgcaacggttgctacgggattttgcacggccctgccggagctgccgccgctaagatcgattttggcgtgacagatccggagattttaagcgccatcacctggcacacgctgggccagccggagatggggatgcttgataaagtgatctatacggcggatattttggaggaagggcgccaatggccgggcattgaagaagtgcgcacggcgatacaaaaggatctggacgaagggctgcgcctgtgtgtcgggcgggggatggagtacctgatccaaactaaccggccgattcatcccagtgcactggcgctgtggaacgaactgaattttaccaatcattaagggggaacatgcatgaccacgaaggaaatggcggttaaaatctgcgaggcactctcggacaaaaaagggcgggatgtgctgatgctggccgtagaacatatgacgatcatcgcggactattttgtgatcgccagcggcaactccgtgccgcaggtgcaggcgctcagcgacgcagtggaggaatgcgcccaggagatgggcctgagccccaggcgcagcgcgggttaccgggaagggcgctgggtcattcaggattttggggacgtggtggtccacattttccaccagcaggagcgcgagttttacgacctggaacgcctgtggacggacggcgacaacgctacctggtttaacgaagactagcgcttggcgcgcagggcgtggaaggcctacttccacgcttttttcttaacctgagcgtccgggaggagtagcggatgaatacgctttatatcaaccgtatcgagcgaattgagcggctgcagggcatatcggagcaggcaagctattatctggcactgccagcggtgcgcgccctggataagggcctggcattgcacagcccggtcacgatattggcgggcgaaaacggaacgggcaaatcgacgctgctggaggctatcgcagtcaactatggattcaatccggagggcggcacacgcaatttcaattttgcttccgtccagacccattcagagctctatcgcgatatccggctgattaagggtgtaaaacgcccgctggatggcttctttctgcgggcggagagcttttataatgtggctacagagctggatcggctggacgaggcgtatccagacgatttaaagctcaaccgctattatggcgggaagtccctgcatcatcaatcccatggagagagctttctggcattgatgctcaaccgcttctccggccaggggctgtacctgctcgatgagccggaggcggcgctctctcccagccgccagctgacgctgttggctcaaatgcatcatttgctagaacaaggctcgcaattcatcatcgccacgtattcgcccatcctcatgggctatccgggggcggagatcttttggctggacgaagaggggatcaggccggtagactataaggaaacggaacattatatcctcacccgcaagtttttgaatgacccgcaaagcctactgcgctacctgtgggacgaaaaagaataggcaatacaaaaagcctccggtaaatccggaggctttttattgtttgacttaaagaaccaatggcttaacgctttttacgccggtagaccaccacgcgtttacgccggtttttgcggcggaagcgccgggccttgcggatgcgcaggatcaagatgatcagcaggataacggccagggcgatcagcgcataggtcagatagctgggcttgccgtcctcctgggtcagatcgggcagagagggcagggcggtttgctcttcgtttaccgcgttttcagccaccagcgtgcccacagataccggatcgtcccccttaaaataggtatagcgggtgatctgctgcccctccgtgatgggggccttaatggtagcaagatcgttttctggctcaaggacgagggctgttggatcgttttgcagctgggcgatgttttgcttggtatcaacgataacggttgaggtgctttcatccggtaccagttttagctgaacgcggccttcagaatcatctgaagtatccgcgttttcggggacaaaggagagaggggactgtgcgtacagttcctgcagatccagcgcgccgtaatatttaaaggcgtagtcgaacatggtcttcatgcccttccatttgccctctttttcatcgttcattaccacggcgatgacctctacgccatctttagaggcggaggccaccagggtatggttggccttggtggtataaccggtcttaacgccgatggcgtattcgtaataataaggggagttagggtcgatcaatttattgccgttgaccaggatgcgttcgtcggataccacttcgttggtaggaagctcggaaatgcgggtggaaacgatttcccgaaattttgggatgctcatccccacgcgggccagtttggccatatccgccggggtcgtataatggttttcatcatgcagaccatggggattgacaaaatgcgaattggtcatcccgatttctgcggcataggcgttcatcatatcggcaaagccttcgatagaaccaccgaaatgctcggcaatcacggccgccgcatcgttgccagagttaagcatcaatccatataatagctgctccagtgtcaacgtttcgccagggcgcagtccacaggtactgctgcctgcctcaatggagttgacgatgttggaaaccttgatctcctctgccagatcgccgtttttaagcgccaggatgcaggtcatgatcttggtgatactggctgggtaacacttggtatcggcatttttagaaaaaaggactttacctgaagcggtgtcgatcaagatcgcacagggggcggtgatactgccctgcgagagcttttgaaattcaggcagcggtgtaggcgaggcgctggcctgtgctgaaggagacgcttgggaatcgggctcggccagcgctacgccggtaatgccgcctatcagcagtaaagaacacaaaagtagggagatcagttttttcaacatttacgacaacctcagttcttcaagcttttatttactatccttatgagaaaaccagaatcaatcatgcagatagaaaatagaggaattccccaataatcctcgaatattttaacagagtatggatattctgtcaaaatagcggatatgcccgctgatggaggcgaaatatggataccggcaagacggaaaatgaggccaagccgcgtaaaatgaaacggattaccaagggaatggtgctgggctttatcatcttggcgattttttgctgccaggccgtttatctgatctcttacgcatttacggcgccgcaggcaggacagacgccccatgtgcaggcgcagcagggcgctaccccaacgccggcggagtatgtgtggattacgatcgcaggagaggtcaacgagccgggcgagtataaattaaagcgcggctgcacggtgcgcgatgtcgtagaaagggccggcggctttgcggattttgccgatgtggataagcgccagtgcaaagcgcagctatggcacgatcaggaagtggagatcaaacggcagaataacttccgtgtgcgtgcggatggcacagtctatccgtttgtggacggcaagctgaatatcaacctgggcacgaaacaggattttatcgacctggatggcattggcgaaaagacggcggaaaagatcatcgcctaccgcagcgaccattatttttacagcctggaagagctgatggaggtgccggggatgacgccgaagctgtatgaaaaactgatggaacaggtgacgctggattaccaggattattaatgaaattatttttgcggctttaagggttgcggtttttacaaaataagggcaaaatagaactgtatgaagaaagcgtaaagaaacgataaactttagattggggagtggaacagcgtgccgcagacgatactgattgtagacgatgagccgatgatcgtaaagggcttgaagtttagcctggagcaggatggctatgctacggacgtggcctatgatggcgaagaggcgctggataaatttaaaaacggcaaattcgaccttattattttggacctgatgctgcctaagatcgacgggatgcaggtctgccagaccatacgagaatcttcagaaatacctattgtgatgctgacggccaagggcgaggacatggataagatcctggggctggagtatggggcggacgattatatgaccaagccctttaatattttggaactcaaagcacggatcaagaccatcttgcgccgtgccaaatcgcatgtacagccggtgcagacgattacagtgcgccagctggtcgtcaatctggatcagcgcagcgtacaggtggacgggaaggatgtacgcctgacggtgaaggagtttgagctgctcaagcttctggccactaaccccggcaagatcttcagccgggatacgctgctggaaacgatttggaaatacgattatttgggcgacctgcgcacggtggacgtacatgtgcggcggctgcgcgagaagatcgagcgcgacccggggcagcccgaatttatcctgaccaaatggggagtgggctattattttaccgatgcttaagccctttcgcagcatccgatggcggttggtggcgatctaccttttgatcgtgctgctggcaatgggcacgctcagcgtggtgattaccatgctggtagaagattcgctgatccaagagcggatcgagcagcagcaggcccaggtagaccggctggccttagatgcctcggcctatatgtaccgggcggatgccgagcagttataccgtctggccgttgaacaggcggaagcgctgggcgggcgcgttgtattgctgagcatgggcggcatcgtgcaggtggacagcgcctcgcggctcaacggccaggcgatcggctacagcgaggtgctcgacgttatcggaatggagaagacaaatgcatatggtttccaccgcgtgacggatgtttcggctggcggagagaagaattgggcggtctattataccgcgcggatgacctaccgcaatagcccggtaggggtggccctgctctcggtttcgatccaggacgtgatggataagattcacaacctacgcgttgagatcgtcatatttttattggcggtctgccttgccgtaggctttattagctttatcatatccgagatcatcgtcaaacctatcctggagatgacccgcgtgatccgcaatatggcgcagggtgattttaccaggcgaatcaagatcggccgctttggacacagcgaaatatccgatatggcgcgggcctttaatggaatgagcgagcagctgtcgaacttggagcaatcccgcaacgaatttgtcgccaacgcctctcatgagttaaaaacgccgctgagttccatgaagattatgatccaaacgctgcttttgcagccggccgacccggagatgactcacgagttcctgtcggatgtggatcaggagatcgataggctaaacaatattattaacgacctactatccctggccaaggcggatgccagccatgtggaaaaccgcttgagccgcgtgaatttgaaggatctgctgcaggccacgctgcataacctggagccgttggcacagcgcaagcagatcgatatggagatggttttgccggaaggggagctgacgctgcaatccgatcccatccgcctacagcaagctattagcaatatcatcgataatgcgatcaaatatacgccggaacaaggcagcgtccgcatcgaggcggcacagcagggcgcccgtattgtgatctgggtacaggatacggggtatggtatttcgccggaggatcaaaagcatatttttgatcgattctaccgtgtggataaagccagaagccgggccaccggcggtaccggactgggtctggcaattgttaagcagatcattacaggcttgggcggaagtattcgcgtggaaagccaggaaggagaagggtcgacctttacggtcgagctgccgatagagccatgaagaccaaattcatcataaaagaacaggacggagtcagaaaaaagcctggggcgggggcacggatgtgtgcgctgcttatggcgttgctgctgaccagcggatgttcgattttggacagcttatcgcctgtacatgaggaggccctgcccagcgaggaggacgccgcccagatcgaatataatgtggggacgactcaatccacctcctattcggcgacgctgtattacatttaccagggcgataacgatatgctgctgccggaaaagcgcaccctctcttttgatcaggaccggcgtattgaaacggtgctgatcgaagaactgatcaaagggccggcgcccgagcagaccaatctgttggcggtgatcgatcccaatacaaaggtcatcagcgtaacgggcgacaccggcgccagcgatacgctgtatatcaccctgagtgcagagtttttaaatgagccgccagtgtataaggaaaagtatacggacgacccggcggagctaaaccgctaccggcgccaggcagtgaatgctatcgtcaataccattacagagcttgggcagttctcgcgggtagatattcaaatacaggacgggaaaaatacccgccgcctaatcaatagcgaggcggggcgcacgaccaaccctgccaacaccctggagcctgtaacgcggcaatatgatgtgatcatcacgccgcgaatggtggtgcaaaaggtgtttaccctgatgcgggatcgggcatggcgcgcgccgctgggcaattatctctcctttgaaggatcgcaggataacggcttggcgacctcggaggaacgggcctatgcggagctggcagcgcaggatgtgcagattgaggactttaccattggggatgtgacacaatctaccgacgggaaaagcgcggtggtgaccgtgcgccagttgcagctgcgcgataagctggggaaggtcaaatacagtaaggagaacgtgcccatcaaactgactttagaaaacggaatttggaagatcccctatacccgttttagtaatatactgactttacagtaggtaggagcagaaacggatgcgagtgaataaaagtacgatccgccgcacggggctgatattggctgtgctaatgtgcttcatgtctttaagcggctgctattccgttatgggcacgtcaaacagtggaagcacgatcgtccagcaggagagtgctccctacgttgatacgggtgaggcggatagcgctgtggcggaggatgcgatccaggaggatgatggtgagcgggcctatgtgttgtacttccccaatgaggattatacccgcctgacggtagaggtcgcctacaaggcggcggctgagggcaaaagccgagaggagacggcgatcgatcttttgcttgccggccccagttcggatgatctgcgtcccgtcttcggagagggggtcaaggtgacccgatatgagcaatcgctggatctaatgaatatttattttacaccggaactgctcaatatgagcgatgaggatatcttgcgcgcccaggctgcggtggccaatacgctgaccgagctgggagagatcaagcgcgtggcgtttttttgtgatggccgcctgatacgggtgggcaaccagccgctgatgccgggccaggctatccaggaagagctggatgcctacattatgagcaaattgatcgaccagtttatgttgcccgaggagatcacccagcgcgaagtggtgctgtattttacggatgccaacaagcgctatatgcttccggaaacgcggacggttcgctttacctcggatgatgatgcggactatattctcgatgcgctgttccgcggccccagcagcaccgaatatctgtctgcttcggtatcttttaagctggaggaggggcaaaaaacggcggtcagccgggatggcagaggttacgccacggtagaagtgccgttatcacaggattatgtaaccgactttgccgaatttgacaaacagcgcaccttggaattaggcgctatcgtgtacagcctgaccggttctattgaccaagtgcgggatgtaaaattcatttgcaatggcgagcgggtgttgatggacgaactggatgtgaacggcgacgggcggctaagccggttggatttccttgattatgtgggcaaccggctggtgctgtactatccggataaacagatgaccggtttgcagaagatccagcgcatcatcagctgcaatagctatcatgacatcgacatgcgcctgcaggagctgctcaaaggtccctctaagatcgggatatcctccagcgaaggcaacctgacctggccggtagatacggctacgcagatgcccggctttacaacaaaggtggaggaggacattctatatatcgattttgacagcagcttctacaacctgtgtgtgaatagtctgacccagcaacaggaagaatatttaacagtatatgccatcgtcaacaccatgacggaggtcacgggcatccggcgcgtggcttttctgcgggatgggcagcccgtcgaaacccttaaaggaaacatccgcttgagcgagccgttaatgcgcaacccgggggtgattttgaattccggaacgggtgagcgttaggcccggctatctatttagaaaatagctatatcttgcggcctgctggaaaaagaaatagcatcgtcattatgacccaaaattggaggagaaagcatggctctcacgtatcagcagatacagttggaagataaagagcaaatcgacacctatttaaagccctatcattttgaaaattcagaactgacctttatggatctgttcgtttggcgaaagtcctggtcctttgagtgggcccagagtgacggcgtgctgtatatccgcggcaaaggtccggatgggagctgctttatttacccgccctttgcccgagaccgcgaaagcttggtacgggcgatggatcatttgatcgcccaggcaaaagagcagggtaagccgctttgtatgcgcgagatttctgaaccgctggccggtgaactgcgcagtctatatgccgatcaactaatttttacctataatgatgattattcggactatgtctataaccggcaagacctgctggagctcaagggcaagcgttaccatgccaagcgcaaccatgtcaaccgttttaagtcgttatatgcgtactgctacgagccgctctcacccgaaaatgtggaagagtgcgtacaggcggccgcgcggtgggaacagcttaagcaggaggccggccttacccaggaagaggcgcaaaccatagcctatgagcatatcgccctgcgggaggcgctgagccattttgaggccttgcaggcgcagggcggggccatccgcatcgatgggcagatacaggcgttttgtgttggagagctgcttacgccacaggtgggatgcgtgcattttgagaaagctgatgcgcaataccatggcctgtacgcggtcatcaaccaggaatttatcgcccatacctggccggaggcgctatacatcaaccgggaggaggatatgggcctggcgggactgcgaaaggcaaaacaatcctactatccggtgaaaatgatccgcaaataccgggcagaattgcggtagaagagggaaggatatacagatggatattcgcaccctaaccatggaggatatggggcaggccaaagcgctgtgggacgcggcgtttggggatagccccgcctatcgggactggtattttgccaaccgcatccaagaaggctgctcgctgggcgcctttgagggggaacaaatggccagcatgctgcatatgctgccctttgagctggattggtacggccggccgctggcggccgcgtgcatcgcaggggtagcgacctggccttgccagcgcaagaagggactggccaacgccttacttaaggcatgctttgaacagcttaaggcgcggggtacctctctagcctttctgtatcctttccgccaaagtttttaccgtcccagcgggtttgccacggtgagcgatatggataagataaccttttcggccggcagtttaagtgcgattgatgcgcagggctacaagcttttggagcacgcgcaaacccccaacttaaacggcatacgcgaggtttaccacgagatgaccgtcaactatacgggttatgcgctgcgggatgagcgggcatggcgcctgcgcgcccaggagtgggcggccgatggcggctcgctattatggctggagaaaaatggcgcgtgccggggttatgcgctatgggccagggatggcgataagggcgttgtggaggaatggggcgcacggaaccttgcggatttcggcgcgctgtgccgcctgcttttagagcgctgtggcggcaccggctctttagagatgctggcgccccctgaaacgccggtatttgaatgcctgccggagcgaaaggacgtgcgggtagagcggataccctatgccatgatgcggatactggatgtgcccaaggtcgtcttgccagctatagccaaagatatacaggacgaggttctgttcgaacttgatgatggaacaatagcagaaaatgcagggaaatggatcatttcttgcaaaatgagtatggcgcaacggcagtatgatgcacggaattgcgcgttaaaaatgacggttggacagctgatacaggtcttaacgcactatggaagggctgcagaacaggcgaggtggggcgtttttcccggtgaaaaactcaatttcagtgcagataaaccgattttgctatgggataaatactaaaccgaaagggcaatgttaaaatccttataggatacttgaaacgcgagagttattggtataaaatgatagtaacagatagaaaacctgcatgggacgcatctgcctaccaggacaagaaggggtgaggacaggtgcgcttcgtttatctatagcgcttaaaggaggctcatacatggaacttcagattcaacccaatatggtcaatattatgggccttacgatttcggaatctgtggtcattttctttgtggctagcgttgtggtcataattgcggcgattttgatccgctactttatcatcagccggtttaaagaggcagacgagcaaccaggccgttttcagctgctgctggagtgggcagtagaagcggttcagaatttctccaaagggatattgggtgaaaatgcccactttatgagttcgtatgtcttttgcatcgggcttttcattttgctggttgggtggatcgaccttttcgggctgcgcacgccgttgagcgatttaaacgtaacggcgggactggcgatcatcacctttgttatgatcaactttttcgccctgcgcaaaaaagggctgggcggacggatgcgctccctggctacgcccaatgcgctgttcgcgccgctgaggatgctcagcgacgtggcggtgcccgtttcgctggcctgccggatgtacggcaaccttctgggcggcacgattgtgctggagctgctgcgcagcgtactgctcagcctggttaaaaactactggttcgcggtggtccccgtggcgctggcaggcgctatgccgggcatattgtcgatttattttacgttattcgatgtcgctatccaggcttacgtctttatgacgttgagcgtgacgtttgtcaacgaggcgattgaataaacgggattatttcccgggaaaaagtgatggaggtacggaaaatggatttgggcttgttagcaattggtgtaggtatagtggcgctgtccctgttgggcgcaggcttaggtatgggcatggcggtatccaaagccatggaggctgtgggccggcagccggaggccagcggcaagatcaaccagattttgctggtaggcttggcgatggtggagtccgttgcaatttacggctttgttacggcgctgttggtcattttcgtactgggtgcaaaataacggttttgaggagagaacatgagtattgatatcgtcagtgttctgctgatcatcgccaatgtgctggtgctgtattttgtcctcaataagctgctgtataaaccggttgcaaagtttatcggcaagcgtgaggaagccatcgggcgggcgcgcgaccagatcaaccgcggtaaaacggctgagacggatgctaaagcgcacgcagaggagattttagcgcaggcacgcgcccaggcggaaaagctttccgcccagattcaggaggaggggcgggcccgcgcggacgcgatggtggcccaggccagggagcaggctgagggcatcgttcaaaaggcgcgcgagcagatggagagcgagcgcgagcagatgcgccgccaggtgcgggaagaagccgttggctccgcgctggcgttgacgagtaaaatgctgaaacgcgaggtcacccgtgagaacaatcaggacatgatcgacgagtacctcgaaaaggtgggataaagtttggaaaagctcaagggacagatctattcggcctacccggtacagggcgacgggctgcagctgctggaagagaagttttccaaaaaatatggccagcccgtaacgctggaatgggtgcaggacgacgagattttggccggtttcaaggttgagatcctcaacattgaccaggccccccgcaagacgtatgattacagcttatccggacagctggagcagcttaaccgggagctgatcgctgacgtagatgcgaatgatgccgacctgagccagacactgaaaaaccgcattgcggattacgcgcccagggctaccgagcgggataccggctatgtcatcaccgccggtgacggggtgcagcgcatttcggggctgcgcagcgtaaaatatggcgagctgctggcctttgagggcgatgcgtatggcatggcgctcaacctgacggaggatgaggtttcggccgtactgctgaccaatgccgatcaggtgggcgaagggacgaaggtatacgctaccggccaggtaatggatgtgccggtgggcgagaacatgattggcaggatcgtaagccctttggggctgccgctggatggaaagggtcccatcaagaccgataagcgccggcccatcgaaacgccggctccgggtattatggatcgtcaatcggtcaagaccccgttgcagacgggattggtggggatcgattcgatgatccctatcggccgaggccagcgtgagctgatcatcggagaccggcagacgggcaagacggctatcgccattgataccatcctcaaccagaaggggcagggcgttatctgtatttacgtggcgatcggccaaaaggcgtcttccgtagcgcagctggcagggcagctggaagcggccggggcgatggactataccatgatcgtcagctcctgcgccagcgacccggcgcccatgcagtacatcgcgccctatgcaggctgcgcgatggcggaagaatttatgtatgcaggcaaggatgtattgatcgtttatgacgatctttcaaagcatgctgtggcgtaccgcaccatgtcgctactgcttcgcaggccgccgggccgcgaggcttatccgggcgatgtgttttacctgcactcgcgcctgttagagcgcgcggcgcgcctgagcccggaaaagggcggcggatcgatcaccgcgctgcctattattgaaaccatggccggcgatatctctgcctatatccccaccaacgtgatctcgattacagatgggcagatttttctggagagcgagctgttccatgcgggcgtgcgcccggcggtaaacgtgggcctttcggtatcgcgggtgggtggttcggcccaatgcaaggccatgcgcaaggtggccgggcagctgcgtatcgacctggcacagtatcgcgaacttgcggtatttgcccagttcggctcggatctggaccgctctacccaggagatgctggcctatggcgagcggttgacagaggtgctcaagcaggatcagtatcagcctttgactgtagctcagcaggtggcggtgctttatatcgtatcgcaccgcatgcttatgcaggtaccggtcaaccggatccgcgagttttgcaatgcctacctggagcggctgggcgtccagcaaaaagacgcgctgcaaagcgtaatggatacgggggatttgagcgagacggcagccgctgcctttgaggataccgcccatgaacttttgatccagtggggcatcgaggaaaagagggcgtaggatgcaaaatattaccgatatccgccatcatatccgcactgtggaacagacccggcagatcacccgcgctatgtacctgatctcggtatccaagcgacgcaaggcgatcagcatggccgcggccaacaccgcctaccacaagcgggtacatgaaatgatgaaggagattttacagctggcgcccaatatcagccatccgtttttgcgcaaagaacacccacagcgcacgcgcacggcctacatcgtcgtttccggcgataaggggatggccggcgcctacaatcataacgtgctcaacctggcgaccgagcacatggcggggcgggacgaggtctatatctttacggtgggcaatgtggcggcggactatttccaacgcgagggataccgggtcgatatcgagtttttgcatacggcacaaaaccccagcttacataattcccgccagatcgctcgccaagtgctggaactgtatgggatggatgtgctcgatgaggtctacgtagtatatacggaaatggtttcggccatcgtccagacgccgcgggtggaacggctgctgccggtcatgctggacgattttagcgatattgaggacatggagatccaccccaaccgggagctggcttacgaaccttcgccccaggaagtgttcgataccctggtgccccaatatctgatcggttcgctgtacggctgcctggtgcagtccttcgccagcgagcacagcgcccgcatgcgcgccatggatacggccacccgcaacgccgacgagatgctgagcaagctgcgtttgcagtataatcgcgcgcgccaggctgcgatcacccaggagctgacggagatcgccggcgccgcggaatcgctgctgcagggccctcaaacctgaggcgcggctggaggggaatataggaagcgaggaataacgcaatggcaaatgaagcaacacccaataggggcgtattatccgctatcatgggcccggttttggatgtgcgctttcccatggggcatctgccccatattaaaaacgcgctgtacgttaacgatggcgggcggcaggtgtggatggaggtttcccatcacataggggccgaagtggtgcgctgcgtggcactgcaggcgaccgagagcttgagccgcgggctggaagtcgtcgataccggcgcgccgatttcagtgccggtggggccggagatgttgggacgcaccgtcaacgtactgggccagcccatcgataacgaagggccgatccaaagcaaggtgacctggccgatacatcggcccgcgcccagcctggaggaacaaaacccggctgtggagattttggagaccggcattaaagtcattgaccttttggcgccttacgccaaaggcggaaagatcggcctgtttggcggcgccggcgtgggcaagaccgtgttgattatggagctgatccataatatcgccaccatgcacgatggctgctctgtatttaccggcgtgggcgagcgcagccgcgagggcaatgatttggtgaacgagatgcacgaatccggcgttattaaaaagacggcgctggtctttgggcagatgaacgagccgccgggatcccgtatgcgcgtggctatgaccgggctgaccatggccgagtatctgcgggacgccatgaaccaggatgtgctgctgttcattgataatatcttccgctatatccaggcgggggccgaggtctccgcactgttgggccgtatgccctcggccgtaggctatcagcccaccctggccgacgaggtgggcgccctgcaagagcgcatcgcctccacgaaaaaggggtcaattacctcggtgcaggctatttacgtgccggcggacgacctgacggaccccgcgccggccaccaccttttcgcatctggatgccaccacggtgctttcccgccaggtggcggagctgggcatttatccggcggtggatccgcttgcctcaagctcgaggctgctggagcccacgcttttaggacagcgccactacagtatcgcccggcgtgtgcaggagaccttgcagcgctataacgagctgcaggatatattggctatcatgggtatggaagagctcagccaggaggaccgcaccattatctaccgcgctagaaagattcagcgcttcctctcccagcccttctcggtagcacaagtgtttaccgggaatgaagggcggtatgtgcccttgcaaaagacgatcgacagttttgccgctatcgtagacggtgaggtggacgacctgccggaagcagccttcttcatggtaggcgatattgacgaagcgaaagcaaaggctgaaacgctgaaataacggccgccacagcggtggtttgggtagagaagggataacgatggccacattatttccaatcgaaatcgatacgccggagcgccggttttttgagggacaggtggaatctgtgatcttggataccccggatgggaagatcggaatcatggcgggccaccgtcagatcacatccacattggatgtgggggagatctctatgctgcaggacggggagtggaagcacgccttttgttccgcaggtttctttatcgtgctggatggaaagctgaccattatggcgcaaacggtggagtggccggaagagatcgacgtgcgccgcgccaaagaggcgctggaacgggcggaagaggcgctgcgccagaaacagagcatccgcgaatacatgctctccaaggcttccatggcccgtgcgatggcgcgattgcgggtgaccaaccagcacaatgtaaataactaaggaccaaaatcgtttgacttgcggccgttcctctcttaacatggaggggagcggctttttgctgctaaacaggatgggggtatgaggttatgatcgagctggtaaccggcggcgcgcgcagcggcaaaagcagatttgcccaggcagaagcggcgcgcttgggaggcaggatcggctatatcgccacggcgcaagcctttgacgaggagatgcgcgcgcgcatccaaaagcaccggcaagaccggcccgctacatggcgtacctttgaagggcaccgcgacctggcggagtttttatttcggaatccggaaatagatacctggctcttggattgcgtgaccctgtggatcacaggattgatgtttgatcttgggggcgaatggatgcagcctgcgtccgagagggtagagcaggcggaaaagctggtggccgcacaggtgcaggcgctgctccaggcggccgaaaagagggagaagcacttgatcctggtgaccaatgaggtgggaatgggcctggtgcccgaaagcgcctttggacgcattttccgcgatatcgccgggcgcgccaaccagcgcattgcagcccgggcggatgcggtatattttatggtttcggggatccccctgcagatcaagggggcgcagcggtgaaaacgatgataaggcggctgatctttgccttccaatttatgacgcggctacccatccgcaaaaacctggacctgcaggaggaggattttgccggctgcagcgtgttctatccgctggtggggctgttgaccggcggcgtaggctgcctggctgcttggctaacggattttttgcagctccccctgctgaccggcttttgtgcggtattggctatggtagcggtaaatggggcgctgcatttggatgggcttgcggactgctgtgacgcgctttttagcgcccgcagccgtgaaaagatgctggagatcatgcgggacagccggctgggcactatgggtgcagtgggcctttttgccgacctggctgtaaaaacgttgttgatttctccggctactacgatgacgtataatgggtatggcgcaatcttgctggcgcctctagtaggcaaggcatgtattgcggtcatggcttttctgggccgcagtgcccggcgcgacggcctgggcgtggcggtgatcgaccatatgaagggcggatacctgctgattaacctgttggcggcgctggccggcgccgctgtctggggacgcagtctgtactggaacgctgcggtgttggccggcctggcgctggctatgcttatgacgctttactttcataaaaaactgggcgggatcacgggagattgcttaggcgcggccagcgagatgggagagatcggctttttgctggcgctgcgggtcattagcgtatgggggtaagaaaatgcgattgatatgcgtgcggcatggggccacgccgctttcccagcaaaagcggctgtgcgggtggacagatgtggcattaagcgctttgggacgggagcaggctacccgcacggcgcaggaactgcgcggaggcggatatcgctttacaaaggtctatgcaagtccgcttttgcgttgccaggaaacggcgcgcctgttggcgccgggaagagaaattatcccgctggcggaaatgaaagagagcttttatggcgcctttgaggggatggagcatgcccaggcgcagcgggccgacccggagggttaccggcgctggatggagcattggcgcaccgtggggccgcccggcggggagagctacgcacaggtgctcgcccgggtacgccgcggccttggccaaatcatggaaacggccggtccaacagagaccgtgctgctggtcagccacgcgggggcgctatcggccttgtacgcgctgctcagcgggcaggatgaaccggtctgccatctgcggccggcaggctggtacgaggcgggattttaagcgatatttgtcggcccgcccttttcttttgcgggcgtatgcgttataattttgtaagtattgtgcttatgaagcagtatggtagaagggtaccgattaaagacaggtagcatggaaggatggctcggcggcataagacatggggcccgcgcatcctccaacggccgaaaatgaaacgaagaggtgtggatcatgatttgggaccccaaaattgaatgtatgccgcatagcgatatgcgcgcgctgcagctggagcggctgcagaaaatggtgcagtatgcctatgacagggtgccgttttatcgcaagaagtttgacgatatccatttaaagccttcggacatccatagcctggaggacgtggcgaagattccgtttaccgtgaagaacgacctgcgagatcactacccttacggcctttttgccgtgccgatgaaagagatcgtgcgcatccacgcatccagtggaactacgggccgctctacggtggtgggctacaccaaaaaagatttggatacctggtccaccgccattgcgcgcattgccgcccagggcggggctacggataacgatatcgcccagatcgcctttggctatgggctgtttaccggcgggttcggcctgcattacgggctggagaagctgggggcggcggtcattcccatgtccacgggtaataccgaaaagcagatcaagatcatgcgggattttgggtcaacggtgctggtcagcaccccctcttacgcgctttatatggcggaagttgcggaaaaagctggattcaacccggcggagcttccgttgaaatacggcctgttcggcggcgagggttcgaccgagtccatgcgcgcggagatcgaacggcgctggggcatgcaggctaccgaaaactacggtatgagcgaggtcatgggcccgggcgttgcgggcgaatgcctggaaaagcacgggatgcatattaacgaggacttgttctacgtggagatcatcgacccggagaccggagaggtgctgccggaaggcgcaaagggcgaggtggtcatcaccacgctgtgtaaagagggcattcccatgctgcgctaccgcagcaaggatatctcttacctgatgggcgagccctgcccctgcgggcggctgactacccggctggctaagatcgagggccgcacggatgacatgctgattatccgcggggtcaacgtattccccagccagatcgaagaggtgctgatctccattcccgaggttggcccgcattacgagatcatcgtttcgcgccgcaattatctggatgtattggagatcaatgtggaggtggccgatgggaagctgttggagagcttcagcggccttgagaagttggaagaggagatcaagcgtaaactgcgggtgatgctggggctggacgctaagatcaacctggtggagcctgaaacgctgaagcgctttatgggcaaggcgcagcgggtgacggatttacgcaattaaagtgaggatgacgatatgaaaaagctgatgttgggtaacgaagcggttgcgcgcggcgcctatgaggcgggtgtgcgcgtagtatcctcctatcccggtacgcccagtaccgagatcacggagaacatggccaagtatgagggcccccacgttgaatgggcgcccaatgagaaggtggccctggaggtaagctgcggggcgagctttggcggcggccgggcgatgagctgcatgaagcatgtgggcctgaatgtcgcggcggatccgctgtttaccgtatcctacaccggggtgaatgcgggcctggtggttgtggtggcggatgacccggggatgcactcctcgcaaaacgagcaggacagccgtttttacgcccgttcggcccatatcccgatgttggagccggcggacagccaagaggcaaaagactttacccggcgcgcctttgcgctgagtgaagagtacgatacgcccattttactgcgcatgtgcacgcgtatcgcccatgcccgcagcatggtggagcagggagaggtggagcaggtagcgcttaagcccttccagaaagacccgatgaaatacgtgatgatgcccggcatggcgcgcgctcgtcacctggtggtggaagcgcgcatggagaagatggcgcaaaacgccgcttcgctgggctttaaccgggtagagatgggggacagcaagatcggcatcgtgacggatggcacggcctatcagtacgtcaaagaggcgatgcccgaggcctcggtactcaaactgggcatggtctatcccatcgccatggatcaggtcaaagcgtttgcgcaaaaggtggaaaagctctatgtggtcgaagagcttgagccctttattgaggatcagctgcgcgctgcaggcatctccgtttccggcggaaaagacttgttcggccggcagggagagttgacggccgccaagatcgcggagaagctggcaggccgtaaaatggatgcagcgcccgcggcggagctgccccagcggcctccggtgctttgcccgggctgcccgcaccgcgccacgttttacgtgctcaacaagcttaaattaacggtgaccggcgatatcggctgctataccctgggggcgatggcgccgctgagcgcggtggatgcctgcgtttgcatgggcgccagcatcggcatggcccacggcatggaaaaagcgggcggcgaggcggtatccgagcacaccgtggcggtgatcggcgactcgacctttatccattccggcatcacggggttgattgacatcgtctacaacaagggcaacgccacggtgttgatcctggataattccaccaccggcatgaccggccaccagcctaacccggctacgggtaagaccattcgcctggaggatacctaccaggtggacttgaaggcgctgtgccaggctgtgggcgtacagcacgtgcgcgaggtagatcccttcaatatgaaggagctggagcaggccctgcgggaggagacggcgcgcaaggcgccttcggtcatcatctgccggcggccctgcgtcctgctttccaagcagcagacccactcgctgcgggtgaataacgacgcctgccgcaattgccgcgcctgcatgaagatcggctgcccggccatcgaaaaacgggataagggcgtttggatcaatcaggcgctgtgcaatagctgtggactgtgcgtgcagatgtgcgcctttaacgcaattgaaaaggcgggtgaatagagaatgaagaatctcgatatattgatcgtgggcgtcggaggccagggcacgcttctggccagccggatcttggggcagctggccttgcagatggggatggacgccaaggtatccgaagtacacggcatggctcagcgcggcggcagcgtggtcacctatgtgcggatgggcgagaatatcgcctccccgatgatcgaagagggcggggcggactacatcctggccatggaaaagctggaggcagcccgctggctgaaccatctgaaaaaagatggggcgctggtggtcaacgatcaggagatcgctccgatgccggtgatcatgggcaagatggcctacccggagggactggaggagcaatttgccgcctatggcgttaaggtgacgaaggttgacgcgtttaagatcgcggtcgagctggggaaccagcgggcgtttaactgcgtgctgatgggcgttttggcccgcagtatgccctttgccaaggaagaatggctcaaggcggttgaggtatgcgtgccgcccaagaccatcgcgctgaaccagcaggccttcttgaagggatacgaactgggagtataatttacaattaagaaatatggccgatcggggcgaaagataaaaagcggtttttatgaaccgctttttatgatagaatggacttattaagaagggttaagatcaaacagacttaaagcggagggaaacctatggttaaacagctttctgttttcttggagaataagccggggcgcctggcgaagatgacccgcgtgctggggcaggagcggattgatatcatcacgctgtccatttcggatacgacgaattttggcattgtgcgcgctatcgtaaataatacggataaagccctggaaattttgaaaaacagcgggtttaccgtaaatgtggcagaactcatggcggtttatgttccggatcatcccggcggcctggcagagcttttagcgctgctggaggataagcacatcagcgtggaatacctttattcctttgtgcgcaagccgggggataaggcgatgattgtttttaaagtagaggacgtggccgcggcggagcaaatgatccgcgaggcgggaaaaggtatccagctgttggatgaaaaatcggtcacccaggcctaacggacccgggcgcaatgacggggtgaatgatcatgaggccgacgagggctttggtggatttggaagcgatcgggcataacatgcgcgccttttgccgtttggcggggggggcgaaggtgatggcgatcgtcaaggcggatgcctatggacatggcgccgtaccggtggcgcgggctgcgctgaaaaacggggcggcgtttctaggcgtggcgataccggaagaggcatttgaactgcgggatgcggggatcaattcgccggttttgatcctgggcagccggtgtgaggatgtggcacaagagctggtggcgttgaatatcagccagacggtatttgatattgagacgctgacggtgctggaggccgcggccagggcggcgggccgctgggctaaaatacacctgaaggtggaaaccggcatgaaccggttgggcatcctgcccggtaaagcgcttgaagagtggctggacgcgctacaggcgtgcccgcatatcgcgctggaaggcatgttcacccactttgcggatgcggacggcgcgcaggaagattataccctgacgcaggcgcagcgcatggcgcaggcggtagcccaggttcgggccaggggctttgcccccatcgtgcacgcctgcaacacggcgggcatcctgcggttttctcagtttgattacgatatggttcgggctggcatcggcctgtacggctatccgccggtagaaccgcccgaagggatcgtatttaaaccggcgctcacctggcgcagcgaggtggcctttatccacgacttgcatacgggggagcgcatcagttataatggcatttatacagccaagaccccacggcgggtggcgacccttccggtgggctatgccgatggatataaccggctgctgagcaatacgggttttgtgttgatcgacgggcagcgcgcgccggtcatcggccgggtgtgtatggatcaatgcatggtagatgtgacggatattccgagcgttaagatcggggatgaggccgttctcttagggcagcagggcacacagtgccttaacgccgaagagatggcgcagctttgcgggaccatatcctatgagatcctgtgtaatataggcaaacgggtgccgcgcgtttattatggggagtgaaagggagcatggatacgccgatggaggcggaatacaaaaagctgggcctgcgtcaggagatgaagcgcctgcgaggggcgttggacgcgggggccagggcgctggccagcgagaaaattgcccagcgtttgctggatagcggcctgtgcggcccgggcaaatgtgtgctgagctactgcagcacgggcagcgaggtggcaacaggtagactgatcgccgcccttcgcgagcagggatgcgaggtgctgttgcccaggatggaaaaagagcgggcgctcagcgcgcgcatcttccgcagcggagacacattggtgcggggttcgtacggtattgaggaaccctctaaacacgcgccgcagctgccgccccaaaagatcgatgtagtcctgctgccgggattggcctttgaccgggccgggcgcagattgggttatggcggcgggtattacgaccgttttctgccgcgcctgcgcgaggattgcatcaagatcggcttatgttttgccctgcaggtctttgacgagattccccatgagccccatgacgcacaggtggattacctggtggatgaaaaccgtatcatctcctgcgggcaagacgaggaggaaataaatggataagtggaaagtctgcggtaagaactttttgttttatatggcgctggtgctggtgctgctggccatgatgggcatgatctttcaggccattggtgtgacggaggatgatatggtgggcaataccatcttccgttcgatttttatgatctggctgccggtggcggtcattgcgctttttgtggtacgggcgcgcaaaaaagggtttgcggatatgtcgtataatctgatgatcgagcgcaaaaccttaaatgcgggcggacaagcttatcagcctacgccggaggaggcggagcactgttttaagcccagcaagggatttctcatcggctttgtttcatttgcgccgccggtgttatttgcgcttttggcgttgctcttttccggcgtgcccagcgcgtttgcggtgttcgacccgatctgccgcatcctgctaaacccttacctgctgctgtttggctttgtgattgacgatgtgatggcggcctatgcttttttgcccctgtcgctgatcttgccgctgagctatgcgatcgcctattatactggcgggcgcaggttcagaaaagagcatccttccctggaggaggaaaaggctcgggcgcagacggcgggctagcttgtggattccctgcggggtatgttatgatataaggatggtgctatacttttgctgcgcataattgcaggccgttttggcagccgtaagctgacggcgccacaggggcgggatacgcgccccaccacggaccgggtcaaagaggcggtattttctatacttttgccctatctgcccgagtccagggtgctggatctgttttgcggctccggtgcgctggcgctggaagcccttagtcggggcgccgcgcgggctactttggtggatcgtgatgccaaggccattgccgccgcgcgcgccaatatccacgcgctgggtgtagaagatgagtgcgtgctgctgcagcgggaatggggacaagcactgactcttttgcacacgcaggggtaccaatttgatatcgtatttttggacccgccatatgccaaagggctttataccccggcaatcgaggcattgtacgaagaagatttgcttgcgccggatgcgctgatcgtagcggagcacgatgcggaatatacgcttttgctaaacgatgcgtttgagcttaccgataagcgccgctatggcgatacggcggtatctttgatcaagaggaaagtaacaccatgaggacttgtgtttacccgggaagttttgacccattgacgctgggacatctggacctgatctgccgcgcgcacgatatttttgacgaagtcatcgtggcggtactggtcaacgccagcaaaaagcctgtattttcggtgcaagagcgtatggagatgatccgggacgcggtgaccggcttggatcacgtaacggtggacgcctttgacggtctgctggtggactacgccaagtcgaaaaaggcgagtgtgatcctgcggggtctgcgcgcggtttcagactttgaatatgagttgcagatcgcaacgttaaacaacgagatggcgccggacgtggagacgctgtttatgatgtcgcagccgcagtattcctttttaagctccagcatcgtgcgcgaggtcggctcttatggcagggacttaaggcccttcgtcccttcgcagatcgtcgaccgggtgagccggcggctcagaaaataaataagcgtattatctcagttttgagtgattataaagtaggaggcgtaaagatgaacattcattctttgttagattatttggaggcagagctgggcaagggttccagcatgccgttaaccagccgtgtattggtagaccgggaaaaatgcctggagattttagaggagattcgcgagaacctgcccgaagatattaaagaggcgcgctatatcgtcgagcagcgcaaccagctgctctacgatgcccaacaggagtgtgacaatatgctctctggtgcgcaggaaaagctgaatgcgatcatcaacgaccatgagattacccagggcgcatatgcccaggcagagcagattttggccaatgcccagcagaacgcccaggaggtgcagatgggcgccaaggtctatgcggacgatgtattggcgcaattgcagaactttttggataaagagctggaggacgttgtgcataaccgcgaggggctgcgccaggaataggggctaagggaggacgcttggaggggacatgtacgaaaacgataccatactgcgcatgctttcccagatggaagcgtttttggaaaaggtagccgggctgaccaaaaaggatcagttagacgaggcgcaggccttggtggaaaagacggcggtggaactgctgaacctggaccttcagacgatggagggcttatcctataccaacctgatccagatggtaaacgatggctcgcagaatattcagccgcttaagaccaatattgccgccaagattttggaggcttatgccggtgtgctgcagcgccgcagggagaccctgcgggccgaacagctgcggaccaaggccttttgtatgctgctcctgctctttgaaagggatacctcgcttacagaggagcgggattatctgctgcgccggggcagcgagatcccggtggccgtgctggattatcccagcctgatgcggctttttgccatgtttgaattttgcggcgcatacgggtgctgtgaggatttgctttttgatatgctggcagaggacgacttggcgccgcgcaaggcagaactggcgaatttaggttttgccttttatacgcgcatgctggcgcttgaggatgaggcgctgcagcggggcaacctgccgcggaccgaggtcgaggtgggttttgcccagtttttagcccgggtgcgcaccgtattggtggagcccggtaactgggagcggatcatctgataggaggggaacaatggttaaaattatcatcgatgcgatgggcggcgatcatgctccggatgaggttgtcaagggcagcgtcgaggcgctgagcaggtttgaggatatcgagatcacgctggtgggacagcaggaggcgctggaaaaggcgcttgaggggatgtcctatcctgaaggaaggcttaaaaccgtatttgcctctcaggtgatcgagacgggcgaggtgcccgtgcgcgccgtccgccagaaaaaggacagctcaatggtggtaggcatgcggcttttggccggcggcgagggagacgcgtttatctcagcaggcagtacgggtgcgctgctcaccgcgggcatactgatcgtccataccgtgcccggcgtacaccgcccggcgctggcgcctattttgcctacggcgcgggatcccttcatgctgatcgattgcggggcaaatgtggactgcaagcccgtcaacctgcagcagtttgccatgatgggcagcatttatatgcaggaagtggcgggcaaagagaatccccgcgtggggttgatcaatatcggcgcggaggaggagaagggtaacgagctgacccgaacggtctatcaggagcttcaaaagatgcccatcaacttcatcggcaatgtggaagcgcgggatattccggagggaaatgcggacgtgctggtctgcgatgcgtttgtgggcaacgtggtgctcaagttcatggagggcttggccagcaccatgtttaccatgctaaaaaaagaattgatggcgacgaagttttccagtatactagcactagggctgaaaaaacgctttgccagctttaaaaaatccatggattataccgaatatggcggcgccccgctgctggggctgaataagtgtgtgatcaaggcgcacggcagttcaaatgcaaaggccttttgcagcgcgatccgccaggcgcgggaatttagtcaaaacgacctgagcggcaaagtccgcgaggggattgcgcgcgcaggcgcggcctttacgcgggacgtgtaaggggcaggcatagagatagagaatagattttgaaggatgaggtgctgaaaatggtatttgagaaagtagctacgaggattgctaaacagctggatatcgatgcttccaagattaacatggaatcccgcctgatcgaagatctgaaggccgattctctggacctggtggagctggtcatggatctggagcaggagtacgacctggagatcgcggatgaagagctggagagcatgaagacggttgccgatatcgtcacgtttatcgagcagcactcttaattacaacgaattcgggcgggcccggggattatgcccccgggccttgatcatgctatagggatgaggaaaaaatggcgtataccaaagaacaatttgaagcggatatcggccatcgctttttagacaggcagctgctgcgctctgcgctgacgcattcctcctatgcaggccggccggaggattggccgcataacgaacggctggaatatcttggcgacgccgtggtggaactggcggtgagtgattggctatataaccatatcccgcctctacccgaggggcagatgacccaggcacgggcgcagagcgtgtgcgaggcggcgctggccgggtgtgcgcggcagatcaggctgggtgagctgctgtatttaggcaggggcgaagagctgacccatggacgggagaaaaactccatcctttcagacgcgtttgaagccttagtgggcgctttatatcaggatgcggggtttgattttgccaaagattttgtgctgcgcgccgtaggtccgctgctaatcacagcgctaaacggcgaaaatcaggattgtaagacccagctgcaagagcggcttaaacagctgcaaaggggcgatccggagtatgtgatcctttcaagcgaaggccccagccaccgcccggtctttaccgctgcggtggaggcggatgggcaacgcctgggccttgggcagggcggcagtaaaaaggaagcggagcaggctgcggctgcccaggcgctggaaaagctggccgagctgacagaaacaaaagggtaagtgggtgaaggcaacttgtttttaaaaaagctggagatatacggttttaagtcctttccggaccggattgaaatccaatttgagcgcgggatcaccgggattgtagggcctaacggctctggcaaaagcaacattggcgatgcggtgcgctgggtgctgggcgagcagagtgccaagtccctgcgcggcggcaagatggaagacgtgatcttcagcgggacggagaagcgcaaaccccttggctattgcgaggtggcgctgacctttgataatgaggatcgggggctggatatcgactataccgaggtcaccattatgcgccgggtctatcgttccggcgagggcgagtattttatcaataaaaacgcctgccgcttaaaggatattgtggaactgttccgcgataccggttctggccgggaggggtactccgttgtaggacagggcaaggtggacgagatcctttccgccaagccggaggaccgccgccaggtatttgaagaggcggccggggtgatgaagtataaggcgcgcaaggaagaggcgacgcgtaagctggaccacacccaacagaatatggcgcgcatcgaggatatcgtgcaggagctggagatccagatcggcccgctaaaagaacagagtgaaacggcaagggtctatttagagctgcgcgaccagctgcgattggcggatctgaacgcgtttttgctgcagaacgagcggctgacagagcgcatctccggctacgaacagagcctgcaggatctgggaaatcaggccgaggcccagggtgaggaagaggcccaggtcagcgcccagcggggcgtgctgcaagaggaactgcacgcgctggaagcgcagctggatgcgctgcatgctaaaagcgcccaggctggaacagagctggagcgtaccgaaggcgaacagcggctggaggcggaaaaagaagagcacctgcgggccgaaatgcggcgcgttgagaacaagcgcgcggaggatgcgcagctgctccaaaacctgagggagcagacggcgggcaaccgctccgccgtcgaggtgcgggaaaaggagatcctccgcttaaagggcgagtggcaggcgctggaggaaaagatcggccaggcggaccggcagatcggggagaaggagggcgagatcgaagcctctaaggcccgggtgatcgatacgctgaaccgcctttctgatatccgcagccgaaaaacacatttgacggcattgcagcaaaacgctaagaaccgcatagcggaaatggagcgcgagggggaaagcgccgcacagcagcagcatacctttgccaatgaattggcgcaggcgcgccagcagggccaagcgttgctggcggataaagccgcttatactgaaagaatagaaaaaaatgcggcccagagccaagcgctagaggggcagcaggcccaggcgcaaaacgaggtgcgccgcagcgaggcagattggcagagcctgcgttcccgcatcgagcttcttaaccagatgaagcgggagcatgagggttttcagcccagcgtgcgcagtatactaagcgcctgcgccaagaatgaagcgctgggccagtgcatctgtggcgtggtagcggagctgatgcacgtgccggccagaatcgagcgggcaattgaaatggtcctgggccccgcgctgcagaacatcgttaccccggacgagcaggccgccaaaaagatgatcgaatacctaaagcgcacgcagaccggccgggcaacctttttaccggtcagctccatggtgccgcgcaccctgaacccgcgagagcgccagacgctttcacagccgggctgtattggagtcgccagcgagctggtcagctttgatggacggtaccgcaatgtaatggaatacctgctggggcgcaccgtggtggtggagaatatggaggcgggcattgcgctttccaaagtcaaccgttccgctttccgcatcgtgacgctggacggcgatctgtttaatgccggcggatcgatgacaggcggcagcttccgcggcaaggcgaccggtattttgagccgggcgcgagagttggaagagggcaagggcaagctggatgcgcttaaaagtgagatccttcaaaggcgcgagcgggtggcacaactgcagcagcagagcgaagcgctgtcgcaggagagcttggagctgcgcgctggcttgaacgcgttggaagtggatattgcccgggaaaacgagcgctgcagcatcctgtcccagaaccggcaggagagggctaaccaggcggcccgcttccgccaggaggcggcgcagttgggcgagacattgcaggatatcgaaagcgaactggcgcaaatcgcccagatggagcagaatatcgaaggcaatacctcctcctctcaagaggatatgacccaaacgcaagagcagcttagcgccctgcgccaggaccgggcggcattgcaggagcagtccacggcgctgcaggtgcagctggcagcctgggagaaggagtaccatgccgatgtgcgggatatcgaccgcattgggcgggatatcgcgcggctggaatccgaagtggcgcgggcagaagaagatgtggcgcgcatacagcgcgaattgctggataccagaggccggcaggaaaagttgaaggatgaactgacagttggacgcgaggcgatggatgttctgcaggcggagctgggcgaaaagcaggccctgcgcacccaaaagcaggggcgcgccgcagccctggaggcccggcgggaacaactgcaaagcgagcaggccgccgtgctggagcgccagcaccgcatcgacgtacaaaaaacgcgcgcggagctggagatggaaaacctgcaaaagcgcatttgggatgagtatggtttgacctatggcaccgcgcaggaataccgtcgggaagggatgagcctggcgcagtgcaacaatcaggcaggcgagctgaggggccgcatccgagagctgggcgacgtcaacgtcaacgccatcgaggattataagcaggtatcccagcgctatgagtttatgaatgcccaactacaggaccttcaggcggcgaaagaggacttgatcggcatcatcgaggagctgcaaaaaaagatggccgtacagtttaaggagcgcttcgccatcattaatgagaactttaaggagatcttttcgcagttatttggcggcggacaggccgaactacggctgctggatgaagagaacctgctggagtgcggtatcgaagtcgtagcccagccgccgggtaaaaagctgcagatgctctcgctgctttcgggcggggaaaaggcgctgacggctattgcgattctctttgccatgctgcggctcaaacccacgccgttttgcattctcgatgagatcgaggcggcgctggacgaggccaacgtggtgcattttgcccaattcctgcacgagtacgcgcataaaacgcagttcgtggtcattacccaccgcaagggcaccatggaggcggcggacgcgctttacggcatcgcaatggaggaaaagggcgtatcccgcatgctcagcgtgcggatggaaccggccggagaggcggctgtataggactaaagaggggaggaacgacctgtggcggaatccaaaggactgttttcgcgtctgaaacaggcgctaaccaaaacgcgagataatttttcccagcgcgtggaggagctgatctcctattaccgggagatcgacgatgaattttttgaggagctgaccgatctgctgatcgcggcggatgtaggcgtgagcacctctcttaagattattgaggagcttaaagccaaggtgaaggcgcaaaagatcggcgatccggagaaagtgaagggccttttgcgcgagatcatcatcgaactgctgggcgacgagccggtagggctggatcagcacagcggcccgcagattctgctggtggtaggcgtcaacggcgtgggcaagaccacggcgattggcaaactggccaataaatacacccgggaaggcaagaaggtactgttagcggcggccgataccttccgcgcggcggcggcagagcagctggccgtatgggcccagcgggcgggcgtgcccttgatccgccatcaggagggggcggaccccgcggcagtggtttatgatgcgctggaggcggccaaggcccgcggaaccgatcttttgatcatcgataccgcggggcggttgcataacaagaaaaacctgatggaggagctgcgcaagatcaaccgggtgatcgagcggggctatcccgaggcggactataccgcgtatctggtgctggacgcgactacggggcaaaacgcggtgcagcaggccaaggtgtttagcgaggtagccaagctggatggcatcatcctcaccaagttggacggcagcgccaggggcggcgtggtactggccatccgtagtgaattagggcttccggtctgctttgtgggcgtgggcgaggggattgacgatctgcagccctttgaccccaggggatttgccgaggcattgttctaaaatttgcttgacagcttgcggaaaaacgctataataggactgtaaaggttaaaacctttacagtcttttgcttagaatgaggagatgcgatggaacaacggttgcgtgtctcattattattgcagttatacggcgcttttttaaccgagcgccagcgcacggccctggagctgcattacgaccaggatttttccctggctgaagtggcagagctttcgggcatcagccgccagggcgtgtatgacgccatccacaggggagagaacttgttggaagatgcggaaaaacgcctggggctgctgggccgtgtgctggatatccgccagcggctaacggcgttggacgaggcggtggaaagcataccgcagacggcgcaaagcgcgcaggcgctgcgcatagttaaggcgcagttaaaggattggatggacgtttgggaggcggaatatggcctttgagggtttgagtgaaaaacttcaaaatgtaatgaaaaagctctccggccggggaaagctcagcgaggcggacgttaaggcggcgatgcgcgaggtgcgactggccctgttggaggcggacgttaattatctggtcgttaaagattttgttaaaaaggtttccgagcgcgcagtaggtggtgaggtgctctccagccttacgccggggcagcaggtcattaagatcgttaacgaagaactcacggcgctgatgggcaaaacgcaggcccgcatcaattatgcttccgcgccgccaacggtaattatgttggtcggcctgcagggcgcaggtaagaccacgatggcggccaagctggggttaaacctgaaaaagcagggaaaaaagcccctgatcgccgcttgtgacgtgtaccgccccgcggcgatcgatcagttgaagatcgtggccgaaaaggctggcgtacctgtgtttgagcagggccaggaccagccggtaaggatcgccgagggtgccaaggcggagtgtcagcgcttgttatatgatacgctgatcatcgataccgccggccggctgcaaatcgaccaggcgatgatggacgaggtcaaggcgatccgccaggcggtaggcgtgcatgaagtcatgctggtgctggacgccatgacgggccaggaggccgtaaacgtcgcctcttcgttcaacgagcaggtaggcgtggatagcgttattttgaccaagctggatggcgatacccggggcggcgcggcgctttccttgcgcgcggtgacgggtaagcccatcaagttctgcggcgtgggagaaaagctggaggattttgagcctttttatcccgatcggatggccaaccgcatcctgggcatgggcgatatgctctcccttatcgaacaggcgcaggccaacttcgatgaggaacaggccatcaaaatggagaaaaagctgcgcacccagcagtttgacctggaggattttctggagcagttccagcaggtccgaaagatgggcggcgtagcggatctgatcaaaaaactgccggggggccttgccaacaaggtcaatgcggatgacgtagacgagcggcaaatataccgtatggaggcgatcatccgctcgatgacgccgcaggagcgccgccagcccgagatattgggcgccagccgcaaaaagcgcattgccgcgggcagcggctgtacggtacagcaggtcaatcagctgctcaagcagtttgacgggatcaaaaagatgatgaagcagttcggcgggatgggcggtaagcgccgcaagttccgcgggcttccgttttaatgagtttctaaagcaggcattgcttttggataaagaacattaatttttttggaggaatgaatcatggttaaaattcgtttgagcaggatgggcgcaaaaaaggctcctttctatcgcattgtggttgcggattcccgctccccgcgcgatggccgcaacattgaagatatcggctactacaatccgttggtcgagcctgtcgaaatcaagatcgacagcgaaaaggctacccagtggctgaaaaacggcgcgcagcccacgcagaccgtgcgcacgctgctcaagaaagccggcgtaattgaataagacgggcgcgctttgcaagcggccgtaggaatgggggatgagcatgacagaattggttcgttatattgcgcagtccctggtggatcatccggagcaggtggacgtgcgggaagtggaaaacgagaccagcgtcgtcatcgaactccgggttgcgccggaagataccggtaaaatcatcgggaaacagggacggatcgccaaggccatccgcgctgttgtcaaggcggctaccgtcaaggaaaaaaagcgcgtattggtagagatcatctaaagggacggggctgcaaaaaggccccgtcttttttattacgaagtagccggctaatgtagtatagaaagaataaactttattactcgcgcacgcaggcgcatattatttttataaaggagatagacaatgcagcaatacatggtagtagggcaggtgctaaagccccagggcatcaaaggcgagctgaaggtgcgccccataaccgacgatcccgaccggttttacgacctgcaagaggtgcgcatagcgcaggggaaggattacgcggtctatccggtgcagggcgtgcgggtgcatgaggggttttgctatctacgcctggcgggcgtggaggatcggaacgccgcggaggccctgcgcgatcagctgctctatatcgaccgttcgcaggcggtcaagctgccggaggggcgctattttatctgcgatctggaaggttgccaggtcgtagacgaaacgggtgcggccatcggcgtgctggatgaggtgatccagaccggcgcaaacgatgtgtatatgatcaagggcgagaaacaggcctatatgctgccggcgctcaaaacgctgatcctcgcagtggacatcgaaaaaggactgatcaccgtgcgcaaggaagggctgatggaggtggacgccggtgcgtattgacgtgctgaccctcttcccggagatgttctcgccggtgatggacgccagcattttgggccgcgcgcagaagaacgggcttttgaccgtggcgctgcacgatatccgtacctttagccaggataagcataaacgggtggatgattacccctttggcggaggcgcgggcatggtgatggcccctcagcccctgatggacgccattgcccaggcagccggggaaggaccctgcaaaaggatttatctgaccccacaggggcgcccctttacccagcacgtggcagaagaactggcgcagcaggagcacttggtgctggtgtgcgggcactatgaggggatcgaccaacgggtgatcgatacctgtatcgacgatgaaatttccattggcgattttgtactcaccggtggcgaactgggcgctatggtgctgatcgattgcgtgtcgcgtttggttcaaggggtactgggcagcgaggcatcggcgcaggatgagagcttttcggctgcgggtctgctggagtatccccaatacacccgcccggcggaataccgcggccttagggtgccagcggtgctgctttccggcgatgcgactaaaattgaagcctggcggcgtgaaaaggccattgaaaaaacggcgcgcatgcgtccagatctgctggaaaaggcggagctaacgcccaaagagcaagctttagccgcgcgcacgcgcacaggacctgctaatatcgagatcagaacggccgcggtgcaggatagcgtcgcccttgtagccttgcagcagtactgctattatcccatggcgcttaggcttggcaaaatggagatcgcccctgttgctgaaagccaagaggcgtttgctgcgcatcttcttgatgcagagcagatatgcctggcggcgtttgacggcgaaaggcctgtgggcggcgccttagcgaggaatggagcggaagaggtgcagattctgcgtttgtttgtacacccggattaccgcttgcgggggattgccagcaccctgctgcaaagggtagaggcgcatgcgggcaaagcgtcctgtaaagtctttgttcccattgaggaacagcgggatacgctggccttttttaaacgttgcggttttcatcccgtaggcaaggcccagtactgtggcctgccagcccgagtattgctgaagggtgaaaggcagcaaaagggcataaaataaggcttgccaagccttattttagtatggtataattatcgctgtgattacgggcggtccgctgctgcgataagttgatgcggcatgaacgtctatgagggaaggaggaaaatccatggatccgatcattcaggctctggaaaaagagcagcttcgcagtgatcttcccgccattcgcgtaggcgatacgctgcgtgtcttcgtaaaggttatcgaaggttcgcgcgagcgtctgcaggcgtttgagggcgtcgttatcgcgaaaaagaacagcagcgcgcgtgaaactttcaccatgcgccgcgtatcttacggcgtaggggtagagcgtactttcccggtacatagccccaaaatcgaccatatcgagaagattcgttccggtaaggtccgccgtgccaagctgtattacctgcgtgggcgttctggtaaggctgcccgcttgaaggaaatccagtaaaggttatttgccaagcggaacaaaaggcacaagcgttagcgcttgtgccttttttatgtttgccaaaagccatttctttacgggattttaaaccgcgcttcgtcattccttttaccttttttatatcttttcgcctatgctgagagatgtaaggaggcacaggaaagatgacaacagcggcgctaacgcttaaagccaaaagacataaaagcaaacgattgactgtggcccgcatgatggaccggctctacttccgccaccccatgctgtgctatggcgcgatggctttgcttgttccgctctttgtactagctgcggtggctcttctcacggtcgcgctggcactgccgtttatgtggatggccggagcgatataaacgggccgtaaataacgccgcagcacctcaactgccctttatgttttcttaatacaatcttaatttctctttatacacccttagcgcgatgtttatactgcgccaagggtgtttatgatacaatagaagcagtaaagggggtgaggccggcatggagcaagagaagcgaaaaagcccggaggaattgctcgaagccatcaagcgccaggagcaaggcgcggggcgcgggcatttgaagatattctttggttatgccgcgggggtaggcaaaacttacgccatgctgcgcgccgcgcgttcggccaaacggcggggcgtggatgtgacgatcggctatattgagccccactcccgaccggataccatcgcccaattacagggtttagagcagctgccccctttgcaaatagagcataaggggatcaagctcagagagtttgacctggatgcagcgatcgccagaaaatctgaattaattctagtggacgaactggcccataccaacgcgccgggcagccgccacgctaagcgctaccaggatgtggaagaactgttgcgcgcagggatcgacgtctataccaccgtcaacgtgcagcatatcgagagcttgaacgatatggtagcgagcataaccggcataacggtccatgagcggataccggatcacgtttttgacggcgccgaccaggtggagctggtggatatagaaccgcaggatctgatcgaccggctgcgggatggtaagatctaccgggaagcgcaggcgcaaaaggcactgctcaacttttttgacgttaaaaatctggtagcgctgagggagatcgccctgcgccgctgtgcggaccgaatcaaccgcatggccgaaaaggtactgcaagcccagcaagatggttattatacggatgagcatatcctagtgtgcctgtctgcatcgccgacaaatgccaagatcatccgtacggcggcgcgcatggcgggcgcatttaaaggcagctttacggcgttgtacgtggaatctccacagcaggctatagttggggagaagagcaaacgccgcctgcgcgagaacatgcaccttgccgagcaattgggggctacggtagaaacggtgtatggcaacgatatcgctcagcagattgcagagttcgcgagggtttcgggcgtatccaagatcgtggtgggccgcagtaacgcccagcgcaaatatgtgtggagcaaggcgacgctgaccgagcgcctggccgctgcggcgcccaatctggatatctatatcataccggagatggacggcagccggtataaagaacgggtaaaaaggaggctggacaatacctttgcctgggcggatgtatggaagagcctgctgatactggcactggccacagcggtaggcgtattatttaattatcttggcttttcggaagccaatatcattacggtctatatcctgggcgtgctgatcaccgcggtggtgacccgcaggcggatatacagcctagtttcttccatcatcagcgtgttaacctttaactacttttttaccgccccgtactttaccctatcggcttatgataagggttatccggctacattcctgatcatgtttttggcggcctttattaccagcacgcttgcggtacagctcaagcgccaggcccggcaggcggccgccacggcctaccgcacaaaaattctgctggaaaccaaccagctgttgcaaaaaagccataatgccggcgagatcgccgatacggtaggcggacagctgaccaagctgcttaaaagggacgtggttttttacctggcgcagggaaaaagcctggccgcgccccaaacgtttatggccatggccgatggcgacggtgcggcctataccgacgataacgagcgggccgtcgccaactgggtgttcaaaaacaacaagcacgcaggggcgacgacgaataccctgggcggcgcacagtgcctatacctggccgtaagggtcaacgataaggtctatgccgtcgtgggcatagccgtgggggcagaggcgctggatgcctttgaaaacagtatcatgctatccatactgggggagtgcgccctggccctggagaacgataccgcgcagcgcgagcgcgagcaggcggctattttggccaaaaacgaacagctgcgcgccaacctgctacgctcaatctcacatgacctgcgtacgccgttgacctcgatctccggcaacgcgggcatcctgatggcgaatggggaggatatcggccgggagaaaaaacgccagctgtatgaggatatctatgatgatgccctgtggctgatcaacctggtggagaacctgctttcggtcacccgcatagaggagggcaccatgcgcctgaacttaacggcggaattgatggacgaggtgattaccgaagcgctgcgccacatcaaccgcaaaagcgtggaacacaccatcgtcgtccagcaggagcaagagttcattatggccaagatggacgccaagctgatcgttcaggtcatcatcaatatcgtcgataacgcgatcaaatacacccagcccgggtcgacgatcacgattaatacgacaacagagggaaaaatggtcgtggttacgattgtcgataacggcgggggcatcccggatgaggccaaggcgcgaatctttgatatgttctacaccgccaacaagggcattgtagacagccgcagaagcctgggaatggggctggcgctttgtaaatcgatcgtcaatgcccatggtggcgagatcgcagtgctggataacaaacctgcgggtacgatcttccgctttactttaccgctagaggaggtaaccttacatgaataaaccgctgatcttagttgtagaggatgacgcggctgttcgcaacctgattgcgacgacgctggatacgcacgattaccgctatcacaccgcgccaagcggcgaggcggcgatcttggaggccgcttctcataacccggatgtggtactgctggacctgggcctgccggatatcgatgggatcgagatcattagaaagatccgcacctggtccaacatgccgatcatcgtgatcagcgcccgtagcgaggatcgggataagatcgacgcgctggatgcgggggcggacgattacctgacaaagcctttctcagtagaagaattgctagcccggctgcgagtgacctttcggcggctgcattatgccgcaaacgggctggagcagggttcagccgtatttgaaaatggggatttgaagatcgactatgcggcggggtgcgcctatatggcggataaggagctgcatctgacgcccatcgaatataagctgctttgtctgctggctaaaaatgtaggtaaggttttgacgcatacctatattacccgggaaatttggggcagtgcatgggataacgacgtcgcatcgctgcgggtgtttatggccacgctgcgcaaaaagatcgaaaaagatccctcctcgccgcagtacattcagacccacgttggcgtagggtaccgtatgctgcgggtttaaaatagttaaaaagcgtatatgatcggcataaccgcaatttgccatgtatcacgcttctgttgccgttaaggataaagtgcgggaggtgatataagtgcgatatcagggactgcacggcctgcttgcccgcagcaatagcaccaggcaatactttctttcgctcccggtcgccgtgcaggtggcgctgcacgagcaggatgcctatatccataccgcggcccaactgcgtgcccgcgcggtggcgatagagcaatataatagtgctgtacgaatatcacgtttgttatggtgatgaatcggaacgattataccggcctggcctagatcggtgcggagaaaataagaagccgcggggcttaacgatttagacctgcgatgaggaaaagttcaaaagaaaaagcggcgagcccattaggcgcgccgcttttgtggttttgctatacaattaccccatcaaatgctccagcaggatcttaacgccgatgccgatcagaacgatgccacccacaaattccgcctttttctggaaaagaggtcccaactttttgccgatcatcacgcccaatacggatagggcaaaggtggtgcagccgataaacagggcggagaacacgatattggcgttgaccatagccaggctgatgccggcggccagcgcgtcaatactggtggcaatggccagcaggaacagccagcgcgtgcgggtagggtcttcatgctcgcaatcttcctcttcctcgtggaaaccgtcccagatcatcttcccgccgatgatggccagcaggccaaaggcgatccagtggtcgtaatcgacgatataagtgctgatgctgcgcccggcgagccagccgatcgtcggcatcagcgcctggaacacgccaaagaacagaccggttttgatcgcatgccagggtctgaggttgcgaatggtgatgccgttgccgatggataccgctaaggcatccatggaaaggctgatggcgagcagcgcgattgagatcagatccaagtccggtcatctccttaaaatccgttaggttagtaaacgtgaatctatattataggggagaatgtaaaagattgtcaacgaattctatgttgtaaaggcgcgcgatatacgggatcgttggattgtgcttgtgttgtagaagtataaatagtacaataagggttgtataaggggtaaaataaagaaagaaggaggttttgcatgcaatcgattattatgaccgattccaatacggagctgcccctggaagttgtggataagtataacgtaccttttgtgcgtatgccatataccatcaataatcaggagtatttttacgatttgggccgggaatcgaacctggacgatttttatgcccaggtgcgcagcggcgcgatgcccataacgtccatgctgccgcccaccttttacgaggagtattggcggccgatgctggaggcggggaacgatatcctgttcatctgtttttcctcccagctcagcggcgcgtttaactgcatcaatatggcgcgggagacgatcttgcaggagttccccgagcggaagatcaccctggtcgataccaaatcgatatccggaggcgccgggcttttggtgtatgaggcgcttaaaatgcgggaaaacggcaagacggatgaggagatcgtagcctggctggaagaaaaccgcacccggatgcatcactgggtgaccgtgaacgacctgatgcatttaaagcggggcgggcggatctcaaccgcggaggccgtgttcggcgggatcttggatatcaagccgatactaaagatcaatacggagggcaaattgctgccctgcggcaaggtgtccggacggaaaaaggcgatccgcacactggcaagcaatgtagagcaaacggtgggcgacccggcagggaagatctgcgtgatcctgcatggagactgcgaagcggatgcgctattgttgaagcaacagattgaaaataaggtagcctttcaggagatttgggtccgcaaagtcggcccggtaatcggtacacatgctggccccggcgtgttggccgtgtgctatctgggcaacgagcggtaaagcgttatttaacggaatcattttatttattgtttattcagggcgccccattttggggcgcttttctctgccggggcggcaaaacttgtttgacagcccggatgggccatgctataatagtcaaagccgcatgaaagaggccttttaagccatgcctagcgcatgcgccttaacagcgagactggttggaggaggtgcaaagatgtacgcgattattcagactggtggtaagcagtataaagttcaggtcggcgatacggtcttcgttgagaagctgcctgtagccgagggcgaaaacgtcgatttcgacgtgttgatgctgcaaaacgatgaaggcgtccaggtgggcgcgccggtagtggaaggcgtcaaggttcagggcaaggtcttgggccacggcaagggccagaagatcatcgtctttaagtataaggcgaagaagaactaccgcaaaaagcagggccatcgtcagccgttcaccaaggtagagattaccaagatcggctaagcgatgattcgggcgagattttacggttcctctaaggcttgggaagggttcgcgctggaagggcatgccggctttgaggatagcggcagggatgtggtctgtgcggcggtttcggcgctggcgcaggcggcgtttggcggcatcctcgatgtggtagaggcccgggcggactatcagctttgcgatgatggcgcgctgtctatccgtcttcgtgatgagaccgatgagagaaagtgcgaggatgtgcatctgctttgcgaggtgcttcgccaaagccttgaaggaattgagcacgattttggacaatacttaaaggtaagtaccgattaatagaacggaggtggcaccaatgtttaagatgaatttacagctgtttgctcataaaaagggcatgggctccacccgtaacggccgcgatagcgaatctaagcgcttgggcgtgaagcgggcggatggccagtttgtactttcgggcaacatcctggttcgccagcgcgggacgaagatccatcccggtaacaatgttggcattggcagcgatgatacgctgtttgccctggtggatggcacggtgcgctttgagcgtaaaggccgtgacaaaaagcaggtcagcgtttatcctgaggcggtaaacgaataagaatgtatcgttaaaagggccgtatgcggatacggcccttttttctatccaaattttggggagggggatagacttttgcggtggcgtgaaagcgaaggcggcgttattatcgaaaactggacggagtttgatccgaagctcacctttaaatgcgggcaggcttttcgctgggagggtgagggtgaccgctgggtcggaacggtccaaaaccgcttggttaaactggaacggttcgaagggaaaacatggtttctgcatccctgcagcgctggcgagtttgaaggatattggcggcggtactttgatatggatatggattatgccagcttgatagagcagatgaaggatgatccggtcacctgccaggtcatacgccggatgcaggggctgcgggtactgcgccaggagcggtttgaaacgctgattacttttatcatttcggcaaacaaccattttaaccgcattaaaaagatcactgcatccctgtgcagggagtacgggacgccgatttctgatagcggcgaagtggttgcctatgcctttccaacatcggcgcagctggcgcaggcctcgcctgatgcgatacgggaaaagtgcggcgcgggctatcgcagcgcatatattgtaggcgcggcgcgtatggtggaagagggttttccactagcgcaactggatgagctgccttatgatgaggcgcttaagctcttgcagcagctgccgggggtcgggatcaaggtggcaaactgcatattgcttttcgcctgcggacatcggggcgccttccccgtggatacctggatcaaaaaagttttgacccaggtgtatggcttgccggaccggccaaaggacttgcagcgcgccgcggcgcgctttgggccggaagccggatatatccagcagatgctgttttgctattaccgcatgcatccggaggcgttggaaaaccccaattcctaaaaggatgggtgcgatgcagccgatattgcagggcgttgaaatgctcaacgccaacataaaccaaattgtgtgggggccgttgatgctgatcttcttatcggggatcggcatctacctgtctttccgcatggattttcctcaggcgcgccactttgggcatatctgtaaacataccattggcaccctgtttaaaaagaggaccgcgcgaaaaaaaggggagatcacaccttttcaggctgtttccactgcgctggcaggcaccattggcgtgggcaacatcgtcggggtagccacggcgatcaccgcgggcggcccgggcgcggttttttggatgtgggtcagcgcttttttcgggatgatgacgaagtatacagaagtgctgctcgccgtgcggtaccgaaggaggcgggccgacggcagttttacgggcgggccgatggtctacctggccgatgggttgcattttaaaaagctggcggcgctgtttgcggtgctatgtgtgttcgcctccttgggaatcggcaacatgactcaggccaacgccatttctcaggcggcccaagccctttggggcgcgcctgcgcaactaaccggccttgttgcgatggggatcgtagcctttgtaatgctgggcgggatagggcgcattgccaatgtagctgaaaagatcgtgccgttgatggcgttgttctatatcgccgggtgcgtagcggccctggccatctatggagggcagctgccaagcgcctttacacagatttttcagggcgcttttgacttacgcgcggcgggcggcggcgtagcaggctatgcggtggcacgggccatccgctatggcttttcaagaggcgtgttctctaatgaagcagggctgggcagcgcacccatcgtccacgcttctgcgcagacggataacccggtgcgccaaggcttttggggcatgatagaggtctttttcgataccctggtgatgtgcacgatgactgcgctggtcatcatcgcctcgggattgtgggaaagcgccggcatggatggcctggtgctgacggctgcggcttttaccaaggcgctggggccgatgggcggcagctttgtttcggtcggcgtgatcttctttgcgttatctaccatattcggctggtcggtatatgggcagcgctgtatcgaatatctgtttccgcgcacaccgcggatggcacagggctaccgtattggctatgttgcactggtatttgccggcgcggtaatggaactgcaaatggtgtggaatatatccgatacgctaaacggcctgatggccatccctaacctgattggcgtggtgggcttaagcggcgtggccatccggatgacgcgggattactttgaccatctacgctaaagcgtgggtaggcaaagcccaaaaatatggtataatagcagcatcaaatgcaatggaggacgtatggctgcacaaacgaaaaagaaaaaaagcgtgctgctcaatattattctatttatttctatcgcggtattcctggttagtgcgggaattttggcctggcgcttcatctcggattatcaggaggatcagcacaatacacaggtggaaggggccagtgcggtaggctttttgcaggaggggtaccagcgcggctttgatctaagcgatggcgcatatgagttttcgcctgaaatctcgcccgtatggcctgaaaggcaggacatcggccgtctgcaggagcgctatgctaacctgaacggctggatcatgatccccgggacgaagatcaactatccggtgatgatgagcgataacgagtattacctgacccatgcctacgatggcagcgcgcttcgggccgggtcgatctttatttttgatcacacgccgctggagccggtatcccgcaatgtggtgatctacggccataatatgaaaaatgggtcgatgttcggcgggctcaaggcctattatctgaacgattcattttatgatcaggccaggtatatctatatcgataccaagagcacgcgcctgaagtacgaggttttttccgcttttatcgcccaggagaacgaggaataccataagacagccttcgcctcggatgaggagtacgtcgcttttctccagcgcatggccaagcgcaatatccgcggcgatatgcagcagacctttacggctgacgattcgatcatcacccttgttacctgtaccagcttgggcggcgcgggggaagatgaccggctgatcgttcaagcccgtctggtggagcagcaggaagtacagtaggtcacctataaatttgcgtaaaaactgaggctcttgccaaaacggcaagggcctcagtttaaatcttcatacagttttgttttgctttattgggcgtcatcgcccaacggcagatatttgacgatggtacgcataatgtcaagcagcgcccttttttgcgaaggggatttgttatccagtagctgcaacagttcttcggtcatctgcgggtcgcgtggcttataggaatcagagagcagatagtctactgttacccccaggcggttgctgatcttaattaaggtttccagcgaaaggctgcgctctgaccgctcgatgtggccgataaaagccgtcgtcacgtcggcagactcagccagctgctcctgcgttaaattcaacttttggcgttcttgacgaatacgctgccccagggaggaataattcaccaccataatcaaattcaccctctatccgtttcaaattcttatgttatttcaatctatcacattatcttgcttcctgcaagatgaaaagtcgcatgtttacatttttaagtaaaaaaccgcttatttagaatgactgaaaccatattttaaattatttgaatacggaacttgcaaaatgacctgtgacaggtgcagtatttagtcggctatctgtcctcgggtggcatgacgcttaatggcttcaaagctctctgcgctgatggcatgttcaattcggcaggcatcctctgccgcgaccttgggatttacgccaagggcctgcagccaatctgcgagaagggtgtgccgctcataaatggtctcggcaatggcgcggccggaggctgtcagcgtgatatgcccttgtggatcgatttcaatatagccgttcaaacgcaggtttttcatcgccacactgacgctgggctttgaaaaggacagttccgaaacgatatcaatggcgcgcaccgaaccttggcgccgctggagtataaggatcgtttcaaggtaattctcagcggattcctgtattttcatcgggcgaacctcctttacagatggaattgataatttattatatcatatttaaaataattagcaaaacgaggaggaaaagcttgacaaatcgggttagtgcatgctaacatgcaattggttagcagatgctaaccgatattttgagcttagagttagggttgacttaccaaaaggagtgaacgatatgcccttgaccatggcacaaccgggggaaatcaacgcgatcaaaaaagtgggtggaaaggcggatacccgccgttttctcgaaaatcttgggtttgtagtcggcggcaatgttgcggtggtctctcagatcagcggcaatgtcatcgtcaatatcaaagagtcccgcgtggcgatcagccgcgagatggcaaataaaattctggtctaaaagacacgggaaaggagcaacgtatgcaaaccctgaaagaagccaaggtcggacagaccgtacaggtcgttaaactttatggcgaaggcgcggtaaagcggcgcattatggatatgggcatcacaaagggcgtagaggtttatgtgcgaaaagtggcacctttgggcgacccggtagaagtcaatgtgcgtggctatgaattatccatccgcaaagcggatgccgagaagatcgaagtccgcgcaaaagcgtaagacccgttttaagacctgatcattaggaggaggagaggtatggccattaaaatcgccctggccggtaacccgaatagcggtaagacgacgctgttcaacgcgcttaccggcgccaaccagtttgtgggcaactggcccggcgtaacggtagagaaaaaggaaggcagacttaagggtaataaagatgtaacgattaccgacctgccgggtatctattcattatcgccctatacgctggaagaggtggtcgcccggaactatctgctgcaagaacgcccggacgcgatcctcaatatcgtcgatggtactaacatcgagcgcaacctgtacctgaccacacagctgatggagatcggcatcccggtggtcatggccgtcaatatgatggacatcgtgcgcaaaaacggtgacaagatcgatgttaagcgtttgcaaagcgcattgggctgcgaggtcgtagagatttccgccctaaagggtaccggcatcgacgaggcggcaaagcgcgccgtttccatcgcccagcgcaaaggggagaccccaccggtgcatacctttagcgcgggcgtagaggacgcgctggagcagatctcccgacagatcgccggcgtaccggaggcgcaaaaacgcttttacgccattaagctctttgagcgggatgataagatcatcagtcagatgaaaaatccgcctcaagtggaatcggtaatcaaggctctggaggatgaaatggatgatgacgccgagagcatcatcaccaacgagcggtacggctatatcacctcgatcatccaagggtgcgtcacgaagagaaaacatggcggactgaccgtttcggataagatcgacaaagtggtgaccaaccgcttcctggcattgccgatctttgccgtagtcatgtttatcgtttatttcgtgtccgtcacaacggtaggcacctgggcgacggattgggctaacgacggggtattcggcgatggatggcaccttttcaacatcggcgccggcgaatatgaggaagtttctgaggaatatgcgcttgagcaggaaaaactgagtgcatacttggaggccgctgaagaaaacggcatagatacctctgcgttgacggaggcaatggaagcagaagaaccggatgaggccgctatcgccgaagctgcggaaggctttgaagtacaggcacaagctgccgggctgactgccgaggcacagatcctggacgacgagggcgcagttgaagaaacgctgccggtcggcctggaggattttaaggcagctatggcggcagaagagccgaaccctgcaaattatggcgtttgggtgcccggcattcccggactgatcgaaagcgggctggaggcggccaactgtgccccttggctcagcgggctgattctggatggtatcgtagccggcgtaggtgcagtgctgggctttgtgccgcaaatgttgatcctgttcctcttcctggcttttctggaagcttgcgggtatatggcacgtatcgcctttattatggaccgtattttccgtaagttcgggttatcgggcaagtcatttatccccatgctgatcggcacgggctgcggcgtaccgggcattatggcctcgcgtacgattgagaacgaccgagaccggaaaatgacgatcatgaccacaacgtttattccctgtggggcaaagctgcccatcatcgcactgattgcgggcgcgctgttcggcggggcctggtgggttgcgcccagcgcatactttgttggcatcgcggctatcgtatgttcgggcatcatccttaaaaagaccaaaatgttcgctggcgatccggcgcccttcgtcatggagttgccggcctaccacctgcctacagtaggcaatgtgctgcgcagtatgtgggagcggggctggtccttcatcaagaaagcgggaaccatcattttgttggctacggttctggtttggtttgcctccaactttggctttacggcgcagggctttggcatggtcggtatggaagagagcattctggcggccatcggcaacggtatcgcctggatctttgctccgctgggatggggcgattggaaagcggcagtggcggcctttaccggcttgatcgccaaggagaacgtggtgggcaccttcggtgtgctgtacggcggttttgacgaagtagccgagaacggctggcaaatctggacgaacatgcagatgagctttacggccctgtccgcctactctttcctggtgttcaacctgctgtgcgccccctgttttgcggccatcggtgctatccgccgggaaatgaacagcgccaagtggacctggttcgccatcggatatcagtgcgtgttcgcttatgcggttgcgctgtgcatctaccagatcggcagcttgtttaccggtggcggattcaatgtctttaccattatcgcactgttgctggtagcgctgtttatctacctgctggttcgcccttataaagagagcgaaacgctgggcgtaaaggtgcgcgtttaaaatagaaagaagggaagagcatgctgcaatttttgacggagaacttgggaacgatcttggtcggtttggccgttgccatactacttacgctagtgatcgtcaaactgttacgtgaccgaaagaggggcaaaagcgcctgcggttgcggcggcgcatgctcaggctgcccaggagcggctatgtgccaccatgggcagagcaagacttaagcaaccccataccttgtcaatattagccaaaagggcgcgtctttgggatgcgcccttttggctattaattgttattagggattgacattttagaaagaatcgcatatcataacatatgaacagatgaacatacgaaggggcgtgaaaaaatggcgcgggagcaggagctggaacactgcgagtttcaatttgtacatgaggatgtggtaaacgccgtacagggccagatgcccaaggatgaagttctgtacgatttggcagagctgtttaaggtttttggagattccacgcgcatcaaaatattatacgcgctgtttgaggcggagctttgtgtttgcgatatagcccagctgttgggggtgacgcagacggcggtttctcaccagctcagagttttgaaaaacaataaattggtgaaattccggcgggaggggaagaatatcttttattccttggcggacgaccacgtgcgcagcataatcaatcaagggatcgagcacgtggaagaataaatgataaaggagcggtgaatgagatgaaaaaggcgtttaaattgagagatttggattgcgcaaactgcgcgcagaaaatggaggatgcgatcaaaaagatcgatggcgtgcaggatgtgcaggtgagctttctgctgcaaaagatgacgctgaccgctgaggacggcaattttgatgagatcgtgcaaaaggcggtcaaggcgtgcaaacgggtggagccggactgcgaaattcttatctgacaaaggcagatgagactgtaggaatgatccatgaagcgctgatgtaaggagaatgaccgatgagtaaaaagcacaaaaaaatgctggcgcgcatcctatccgccgcggttttgctggtagcggctaaactgcttccgctggaagggatagcccagcttgccgcttacctggtgccctatgccattatcgggtgggacgtggtgtggcgcgccctgcgcaatatcgcccacgggcaggtttttgatgagaactttttaatggccttagccaccgtcggcgcgttttttacacaggattatccagaggccgtagccgtgatgctgttttatcaggtgggtgaactgttccaaagctacgcggtgggccgctcgcgggaatccatcgcagcgctgatggatatccggccggactatgccaatatcgagcgggagggccagctcgtgcaggtagacccggacgaagtggatgtgggcgatgtgatcgttatcaaagccggcgaaaagattccgctggatggcgtgatcctggaggggacgtcgatggtggatacagcggcgctcacgggcgaatctcttccacgcgaggttgaggcgggggatgacgtgattagcggctgcatcaaccaaagtgggctgttgcgcgtacaggtgaccaaggcctttggcgagtcaacggttgccaaaatcttgaacctggtagaaaactccagcgccaaaaaggcgaaagcggagaattttattaccaagtttgcccgttattacacgccctgcgtcgtggccggcgcagtactgctggcagtgctgccgccgcttttgatgggcgggcaatgggaagagtggatccgcagggcactgatctttctggtgatctcctgcccgtgcgcactggtgatctcagtgccgctgagctttttcggaggtatcggcggggcttcaaaaaatgggatactggtcaagggtggcaactatttagaggtgctggccaatgcagaaacagtagtttttgataagaccggcacattaacccgcggggtatttaacgtaacggctatccatccggatacctgctcggaagcacagctgctggaggtggcagccctggcggagaattattcggatcatcccatctcccgctcactcaaagaggcttatggcgtacagatcgaccctgagcgcgtgacggatgtggaggaactttccggacgtggcgtccgcgtcaaggtggacggccgactggtctgcgtcggcaacgataagctgatggacgagatcggggtcaaatggcacccctgccatcgggtgggcaccacggtgcacgtggcgctggacgggtcttatgctggccatattgtgatctctgacgaggtcaagccggatgcggccgcggcgatccagtcgcttaaggccgaaggcgtacgcaaaaccgtcatgctgaccggtgacgcaaaagcagtaggcgagagcgtggcaaaagaattgggcttggacgaggtgtatacgcagctgctgccggcggataaggtggagcaggtagagcggctgctggcccagaagtcggccaaaggcaaactggctttcgtaggggatgggatcaacgacgcgccggtgctctcccgggcggatatcggcatcgcaatgggcgcgatggggtcggatgcggcgatcgaggccgcggatgtagtgctgatggacgatcagccctctaaaatcgcggaagccatccgcattgctagaaaaaccttgcgcattgtgcggcaaaatattatatttgccttagcggtcaaagcgctgatactggtgctgggcgccttgggatttgcgaatatgtgggaagcggtgtttgccgacgtgggcgtggcggtcatcgccatcctcaacgcgatgcgggcgctaaaggtaaaagccaggggatagaatcgccaagttcataagataaggaagaaggatgcagcatgatgcagttggaacacttggcctggagcattcagggcggtgtggagattataaaagatatcgacctggttgtgccggatggcaaactggtggtggtgaccggccccaatgggggcggcaagacgtcacttgccaagctgatcgccggcatcaccccgcttaaaagcggaaggatcgtctttgacggggaggatatcacatcccttgacgtgacagagcgcgcccaaaaggggattgcctttgccttccagcagccggtgcgctttaagggcctgcgggtgcgcgatctgctggagctggccgccgggcatccgctggacgagggcgagctttgccaatggttggggcacgtggggctgtgtgctaatgagtatatcgaccgggagttgagcgccagcctgtcgggcggggagatcaagcgtatcgaaatcgccagcgtcttggcccgcaaagcccgcttttccatcttcgatgaaccggaggcggggattgacctttggagcttctcgcgcctggtggagacttttgaagacatccgccgcagtaaggcgggcacgctgatgatcatctcccatcaggagcgtatcctggcgatcgctgacgagatcgtggtggtagcggaggggcgcgtgcgtgcggcggggccaaaggatgagatccttcctatgctgctggcggatgaaaaagcggtttactgccctcttggaaaggaggaagcgtaatgaacaaggtgaccgatgaactgctcagaatggtttcggattttaccggcgcttttaaaggcgcgttcaatattcgggaaaacggcgagtgcgccggccgccaatctactgacaatatcaagatcgagtccaaacccaacgcaccggggttggtgatccacattcgcccgggcacaaagggagaaacggtctatatcccggcctgcgtgacagagggaaatatcaacgacctggtctataacgatttttatgtgggcgaaggcgcggatgtgactatcgtggccggctgcggcgtgcataccgaggacgagggagaggcgacccataatggaatccaccgcttctttttagagcgggatgcccgagtcgtataccgcgaaaagcatgtgggcaccggcgcaggtacgggacaaaaacgtattgatcccgttacagaagcgacgctggcacagggcgccagcctggagatggataccctgcagctgggcggcgtggatgagacatttcgtaagacatgggccaagctggcggcaaatgcgcgtcttgtggtccgcgagcggatcatgaccgatggagacgagcacgcccgtactgactttgaagtgacgctggcgggagaggacgcgggctgcgacctggtttcccgctctgtggcacgcggacaatctcatcaggagttttattccagcatcaaggggcttacgcgctgcacgggccactctgaatgtgatgcgattctggccgagaacggcacggtcaccgcatcgccagcgctggaagcctcgcatgtggacgcggcgctgatccacgaggcggcaatcggcaagatcgcgggggagcaaattctaaagctgcgtactttgggattgaccgagcaggaagcggaggaaaaaatcatcgaggggtttttgcggtagaaggaaaaagcgcggcgtttcgccgcgcttcttcttttacataaagttagcaggaaaacgactgttcacacattattcatatattacggcaataaagttcataaatgcggcgtatccttatagtaacaatagaataacggtcggctttgattggtacgaagcgagatagaaaagagggaatcaagatggcagataagatggcgaagatagagaaattgattgaaaaaggcaagtgggataagatcgaggcgaagtacctgaaggggagcgacgaagaacgactggacctggccaaagcctgtgccacttctgacacggacggtgcgttcaactgtttgatcacgctgctgaacgataaaaatgacgcggtgcagctggcggcgatcaaatccgtaggcgctacggggaacgaccatgccacagcgcagctgcaatggcttttacagcggctgccgccggaaaagaaggaaaccatcgacgcgatccatgcggcgatcgccaacgttaaaaacccggaatagcgcttgtataaagggccgacccataagggctggccctttttttgttgcgcagaaatatggtcatcgttcccttgatgcggtacaataaactaaaggaaagcgcatctaaatttaggaaaacgggggatatgaaatgaaactgaaagtgatcaccagttttgagcaagaaagatatattgactttatgcgcagccagggctttgatgtaacgcgggtagcaaagggagatggcggcgaggcggatacgattgaaagaatgcgcggttacagcgccgtggcggtgatggatgaaaccttttctgcgccggtgctggaggcgctgaaagatgagctgaagatcctggtccggctggggatcggctacgataaggtggatacggcttacgcggctaagctgggaatatgctgttgcaataccccgggcgtcatgtctgcgggtgtggccgagcagactataacgatgatgctggagtgcgcgcgcgggttttatcgcgcccatcagatcatgcagcagggcggatgggacaggggccagaccccagcccggcagctggaagggtctaccgtgggattgatcggctttggacatattgcccagcgtgtggcgcagtacctgcaggggtttaactgccgcattctagcctatgatgtggcttatgacgaaagcaagttgaaagaattacatgtgcaaaaggcaagtttagagcagatcgctgtccagtcggattttatcagcctgcatgtaccgctgcttccaagcacggaaaagctggtggacgaggcgttcctaaagcgcatgaagtctaccgcatacctgatcaatacctcgaggggcggtacggtggacgagcaggcgctggcagtggcgctgcgggagggcgagattgccggggcgggcttggacgtctttacccaggagcctacgccccgggataatccgctgcggtatatggacaactgctttgtcaacccccatatggcgacctttacgcaggagtgcttccaagccggttttgaggggatcgtcaaatgcctgaaggagtatgaagcagggcagataccggagttttgcctgaacccggcctatgtgcaaaatctgcgctagctcatcacccgcaatgtacataaaaaagcgatgcgccttttaagcgcaccgctttttactattttaaaaggatttatctatctttggtcaacacaaatcgctggccatgcccgccgatccacacgctctgggcagggtatttggcctccatgtaatcgacaaagcggatgggatcagccgtattgccgggaaacatatcgtaatgcccggggatcgccaaacgcggcgcaagtgttccggccaggtctaccgcctcgcggaaatccatattgccgatgatgttgctgcgatacttctccgcatcccgcccgttgatgggaaggatcatcacgtcgaaccggccggccgcgcgcagtttgctttcctgcccctcatagcggcaggtgtcgcccgcgtggaaaatgcgcacgccgccgctctccacgataaagctcatgctgggatacaggccagttttaggatcggggtctagaaattcgtgggccgccgctacgccggtgatcttcacccttttttcctcgtcctcaaagacctgcccatctgtgaggccaatgatgcgctcgcgtgcgatgccatagcgggcggacagcgcgtcagcaaacagggctggagcaataaaacgggtgttgggagaggctttggccagccgcggccaggtgtacgtgtcgatatggtcggcatgatcgtggctgccaaacacgtagtcgacccccgccaactcttcaggggccagcagcgggggaatgcggcgcttggggctttcggcgtctaaataggggtccagggccagcgtagcgcacgcagtcttaaaaataaagcccatctgccccaaccaccaaaaggccagctcgccttcctgcgcgcggtattccgcaatatccgctatcagttttgttccctgtaacatgcactttgcgcctccttgtcatcgcgattaagttcagtttacacgagcggatgcaaaaagtcacccccatatgcgggcagtttaaaagataaaacacttgacttggagccagctccatatgatagcctgataacaaagaaagaataatacgaaggaggggttatgatgccgcatattgccatagcgatgatcccggggcgggatgaggcgaccaagcagcggttagcggaaagcatgaaaagcgcgctgatatacgaactgggggttccggagaattgggtatcggtctccctgcacgagatcgcgcgggaaaactggcaggacgtgatggagcagatcggagacgaagcgatgttgattcgggccaatattcagccggaagaggggagatgacgcggcgtgcaaaaacgaactttaggaaaaaataagctggaagtatcggccatcggctttggctgtatggggctgacgcagagctatccgccctttccggaacgcagcgagtcgatccggctgctgcgccaggcggtggagatgggcgccacattttttgatacggcagaagtctacggccctttcaccaatgaagaactggtaggggaggcgttagaaccgttacgcaatgaggtggtactcgccaccaaatttgggtttgacctgcatggcggggcgcgcggggcaagcggcaagcctacggggctggacagccgcccgcagaccatccgcctggcggtagaagggtcgctcaaacggttgcgtaccgaccatatcgatctgctgtatcagcaccgggtggatcccaatgtacccatcgaaatggtggccgacaccgtaggccagctgatcaaggagggtaaagtgcgcggctggggcctttcagaagccggggcttcaaccatccgccgcgcccatgctgtctgcccgctcactgcggtgcaaagcgaatactccatgtggtatcgggaaccagaaaaggagattttgccgctactagaagcgtttgagatcgggtttgtgcctttcagcccgctgggaaagggatttttgactggccgctttgataaaaacgcaaaatttgaagcgaacgacttccgcaacagtatcccacggtttgccgaggaaaacctggcggctaatctggccctgatggaggagatcaccgcgctggctgccgaaagggagaccacgcccgcacgcgtcgcgctagcctggctgctcaagcaaaagccgtggatcgtgccgatcccgggtaccaaaaagcgcgaacggctgcaggagaatataggcgcagcccagttgaatctatccgcagcggagtgggcgcggttggatgcggcgctgagccgtatcaggatcgtcggggcgcggtaccccgaggatcaggaaaaattaacgggtaaatagagatattttgaagcccggcgtgcagatatgcgccgggctcgttttattgtatagggcaacggagaagccgcgtataagttggacacgctggcaaatatgaccttttatgctatttttcgctgcagcgttcgcttttataatatttccagtggaaggacttttttaatagtggtatgatgaaggagaacgcgttgcagatgagcagataaacgatgagaaacagccattgggatggagagtgaacatgcgcgaagaaggcaaattcaaattggtgtcgccctacagcccgcagggcgatcaaccccaggcgatcgataagctggtagagggattgaaccaagggtatcaggatcaggtgctgctgggcgtaacgggctcgggcaagacctttaccatggccaacgtcatcgagcgggtgcagcggcctacgctggtcattgcccataataaaacgctggcggcccagctgtgcagcgaattcaaagagttttttccggacagcgcggtggaatatttcgtatcctattacgattattatcagccggaggcctatatcccctcgtctgatacttatatcgaaaaggattcctccatcaacgatgagatcgataagatgcgtcacagcgccacttccgccctccaggagcggcgggatgtgattatcgtggcctcagtcagctgcatttacgccctgggcgatccggaggaatatttgcgacaaagcatatcgcttcggccgggaatgattaaatcccgggaagaggtgctcaagcgactggtggagattcagtacgagcgcaacgacgtggactttgtgcgcggaaccttccgcgtccacggcgacgtggtggagatctttccggccaacgcctctgagcaggcgatccgcgtggagttttttggcgatgagatcgagcgcattaccgagatcagcgtagtcaccggcgaggtgctggcccagcgggcgcatatcgccatcttcccggccacacactatgtggtggcggaggaggccaccgaacaaggccttttggatatcgagcgagatttgcaggagcgcttaaagctgctgcgggagcaggacaggctgctggaagcccagcggctggaacagcgcacgaactacgatttggagatgattcgagagatcggctattgctcaggcatcgaaaactatacgcgctattttgacggccgccagccgggagagccgccctttacgctgctggattatttccccgaagattatttgctgatgatcgacgagagccacgtgaccatcccgcaaatccgcgcgatgtacgcgggggatcgctcgcgcaaaacttcgctggtggattatgggttccgtctgccggctgcctttgataaccggcccctgaaatttgaggaatttgagcggcgcatggggcagaccatcttcgtcagcgctacgccaggcccctatgaactcagtcgggaaaagcagatcgtcgagcagatcatccgtcctacgggcttgctcgatccggagatcatcattcgtcctgtgtccggccaggtggatgatttgctgggtgagatacgcgaggtcacgaaaaagggctttaggattttggtgaccaccttgaccaagaaaatggccgagcgattgacagattatctggtggagatgcaggttaaggtgcgctacctccacagcgatattgaaacgatcgaacgcatggagatcatccgcgacctgcgcgccggcgaattcgacgtgttggtgggtatcaaccttctgcgcgaaggcttggatttgcctgaggtagcgctggtggccatactggatgcggataaagagggctttttgcgttctgaaacctcactggtacaaactgtggggcgcgcggcgcgcaacgtggaggggcgggtgatcatgtacgccgaccaaatcaccgactctatgcgccgggccattgacgagaccaaccgccgccgaaaaatccagatggactttaacgagaaacacggcattcagccccagaccatccaaaaggcggtgcacgatgttttggagatcacaaagccgctggaggagaaacaggagatgtccctactgcagatggaggctgcctttgcccaattggaagagcaaatgttgcaggccgccgctgctctggactttgagcaggccgccaaactgcgcgatcagctgtttaagctgcgcgaaaagcgggatggtaaggtaaccgatgtacccaagggtacccggcgaatgacggctaaaaatccccggcgccgtcggagaagttgagctgtaagggatggatttaatggccacgtcgtgctaaaatagtaaaagataggcttaagcctgcaacaataaaaagggggataaaaaagtggcaaagatcacggctatcggtcacctggggttcaatgtaaaggatatggacgagacgatcaagttctacaccaaggcgctgggcttcaaatacggatttacgattgagaaggatggcaagccctggatcgagtactacaaggcctgtgacaaccagttttttgagtttttctacggcggcagcggggatgcgcctgcagccgggcagtcctatgcgcacgtatgtctggaagttgacgatatggaagcgtacgtcaaacagatcgaggcggccggatatgaactggacattcggcctaagatgggcggggacggcaatattcaggcttgggttgtggatcctgatggcaaccgcatcgaactgatgcagatgtcgcctacctctaagcagcgtacctgctaagggaaaggcaagcggtaacaacaaggatggcagaccccctcgttagcgggcctgccatctttttcatcaaaacggaagttcaaaggagaatcggatttgcgcaattcaatttacatcaaaggcgcgcgggagcataacctccaaaatgttgatttggagatcccaagggaaaagctggtagtctttacaggtttaagcggctcgggtaagagcagcctggcgtttgatacgttatatgcggaagggcagcgacggtatgtggagtcgctctcttcttacgcgcgccagtttctagggcagatggagaaaccggacgtagattatatcgacggcctgagcccggccatctccatcgaccagaagaccaccagtcgcaacccgcgttcgaccgtaggcacggtaacggagatacacgattatttccgcttgctgtatgcgcgcattggtatcccgcactgccccaagtgcggccgggagattcaccagcagacggtggatcagatggtggaccagattcaggccatgccggaggggacgcggctgcaactgctggcaccggtgatccgcggcaaaaagggcgagcacgtcaaggtgttggaggatatccgcaaaaacggttatgtgcgcgtgcgggtcgatggcgagctgcgggaggccagcgaggagatagcgctggacaaaaagcgtaagcataccatcgaggtcgtggtggaccgactgatcgtgcgcccgaatatgcagcagcgtctgaccgattctctggaaaatgccatggcgctatcgggcggcacggtactggccgacctgatgaatggggaggagctgcttttcagcgccaactacgcctgcccggattgcggtatcagtatcgaggcgctggagccgcgcatgttctcctttaacagcccttacggcgcctgcccgacctgtacgggcctgggcacgctgatgaagatcgacccggatatcgtcatccctgaccggaaaaaaagcctggcccaaggggcggtgcaggcctctggctgggtcggcgggctggacgacggaatctccggcatgtactttaaagggctggccgagcattatcatttcgacttggatacgcccataaaagacctgcccgaggaggcggtgaacgcgattttatacggcacgggggatgaaaagatccaagtaagctatgaccggggctacggcacgggcaccttttccaccacctttgagggggtgattggtaacctggaacggcgctatcgggagacccagtccgatgcggccaaggccgagctggaggagtacatggcgaccattccctgcccggattgtcacggacagcgttacaagccggaggtgttggctgtgacggtgggcggaaaaaatattgcccagctctcggagatgtccgtgaccaatgcacgcaaattttttgctgggctggaactgagccggacccatcagatgattgccgagcgcatcttaaaggagattgacgcgcggctgggctttttggatgacgtggggctcaattatctgacgctctcccgcggggcggcaacgctttcaggcggggaggctcaacgtatccgtctggccacccagatcggctcgtccctcatgggtgtgctctatattctggacgagcccagcattggcctgcatcaacgggataacgccaaactgcttaaaacgcttaaacatctgcgagacatcggcaataccctggtggtggtggagcacgatgaggaaacgatgttggaggccgattatatcgtagatgtgggccccggcgccggcgcacacggcggcaagatcgtggcggcgggcacgttggaggagatcaaaaatacgcccgaatccctgacgggggacttcttggccggccggcggcagatcgctattccgcttcagcgccgcaagcctggcaagaactggctcaaggtggtgggcgccaacgccaataacctgaagaacgtggacgtcgcgttccccatcggcctttttacctgtgtgacgggggtatcgggttcgggcaagagcagcctggtcaacgaaatattgaacaaagccctgtcgcgggacctgaaccgggcgcatacccgcccgggcaagcacgaccatattgaaggtctggagcatttggacaagatcatcgatatcgaccagtcgcccatcgggcgcacgccccgctccaacccggctacctacaccggggtgttcgatatgatccgggatgtctacgcacgcacgccggatgcgaaaatgcgcgggtacaaaaacggccgcttcagctttaacgttaagggcggccggtgcgaggcctgcaagggtgacggcatcatcaaaatcgagatgcactttttgccggatatctatgtgccctgcgaggtctgcggcggccagcgctataaccgggagacgctggaggtgcgctacaagggcaaaaatatctacgatgtactggagatgacggtagaggaggcgttggaatttttctccagccaccagcgtatccggcgcaagctacaaacgttaatggacgtaggcttgggctatgtcaagctggggcagccttctacgcaactttccggcggcgaggcccagcgcatcaaactggctaccgagcttagccgccagtccaccgggcgcacggtctatattctggacgagcccactaccgggctgcacatggccgatgtggaacggctggtggatgtactgcagcgcctttgcgagggcggcaataccgttatcgtcattgagcataatctggatgtaatcaaggtggccgaccatattatcgatctgggcccggagggcggcgacaagggcggtaacatcgtggccaccggtacgccggaggaggttgccaaagtcaagggcagctataccgggcagtaccttaaacgggtgctgaaatagcttgtagacctgaaaaagatacagataacttgttttgcccgcggggtggcgccctcaaggtcagcgccgctaagggcaagccgatacaaaaagccgtatggatttctccatacggcttttattgttgagattgttttaatccagaacttccaggccgcaggcctttgcaaagcgcagctgggcggcacgcccttcgggcgtatctttaaacacgcccgcgtccgccagaatctcctggccgatttggcccacttctttgtggatgacctcctgcgcctgctcggggctgaggttttgcccataacgggcgatcagctcatgcagccaatccaaatgcaggtgaaggggatgcccttcctgcgctgcctccggcgcgatagcggcgccgcacagcacttcctgcacggcggccagctctttttgcagccggcccgggaggataaacagccccatcacctcgatcaggccaatgttttcccgcttaatatggtgcagtttttcatggggatggaagttgcccagcgggtgctcagggctggtcaggttgttgcggaacacgatatctaactgccagttttcgcccttcttgcgcgcgatgggcgtaatggcattgtgcggcgttccctcagtctgcgccaaaacgccaatgctttcatccgtataaccctcccaggcttgggcgatccgctccgcgatggcggtcacctggtcgcggccggggccggtcaggcgtacggcggccatgggccagcggataaactcaatgcgcacgccggggtattgcacgtcccgcaggcgcgcccaggcaggggcgttctccatggggaaggtgtgcctaccaccctggaagtggtcgtggtccagaatcgaaccgcctacgatgggcagccctgcattggaaccgataaagtagtgcgggaactggcccacgaaatcaaacagccggcggaaagtggcggcgcatacgttcataggccggtgctcatcacaaaccacgatgcagtgctcgttataatatacataaggcgaatactggaaaaaccagttctctccgttcagcttcagggggatggtgcgcagcgtctggcgggccggatggttcaagcgcccggcgtaccctacgttttccttgcagagcatgcacttaggataactggtggaaaccagatcctttaacttggcaacctcccgagggtctttttcaggcttggaaaggttgatggtgatctgcaactcgccatagtcgctggggctggtccaggcgatgctgcgcgcgacttccgccgtgcggatgtagtagatcttacggcagaaatcataaaaccagtccgtcgccgcacggctgttgcgggagtgccacagctcataaaatcgggcggtcatctcgctgggccgcgggcagaatacgcccatgatacgggtatccagcaaagtgcgctcggtataggtatccccgcatacgccccgcgccgccgcatcgtccacgatacagcccaacagggtagaaacatcttcgccagccagagggccctgcgcggcctcccctggctggggcagctgcaggatatccagcagctggttttgcgcgcagatccggtcctgctcatccaaaaggccgcattggatcgcataatgcagcaacttttccacatccggccaaacttcgtatgccattttaaatttacgcctcacttttcatcttgttaaaagagatcaaggaaccctttcatattataaccgctgacgcacgtgtacacaagagcgagattgtcttgacaaagccgcgctctactgggaaaatgtaacgtgtaatagagtgggatgagcgatcccaattatagaataaggggcgagcggacgatggaatatcggaagtggatggaatacctcggtaccagcgcgggacagaatttattgacgcagctgtatggcgcagggcaggcagcgggcgcgctggagcgttatgggcagttgatgcagcagcatgtgcagcgcaccggggcgcaggagatacggttgtttagcgccagcgggcgcactgaggtatccggcaaccataccgaccataaccatggcctggtgcttgcggcgggtgtgacggtggataccctggctgtggtttctccgcgtatggaccacaaaatcaatgtggtatcagaaggctttcccgaggcgtttgaaatcagtctggatgcgctggaggtcgatgaaaaggcctttggcaccacgcaggcgatcctacggggcatagcgcgcaacctgtgcgaccagggttttaccctcggcggatttgacgccacggtggccagctctgtaccggtaggctcgggtcttagctcctcggctgcctttgaggtgttaatcgtagagattatgaaccagctcttttgcgacggaaagatcgacgggatcgcccgcgcgcagatcggccagtatgccgagaacgtatacttcggcaagcccagcgggctgatggaccagatggcctgttcgctggcgtccatgagcctgatcgactttgaagatccccaaaagccgaaagtggagcgtatcgcctatgatcttgaaaaagccgggtatgctttggtagtggtagccacgggcggcgaccatgcggatttgaccgacgcgtacgcggcgatcccccaggatatgaaagccgcggccaactttatggggaaggactttttacggcgggtggcggtggaggactttatggctgccataccgcagatgcgtgagaagatcggcgagcggcccatcctgcgcgcgctgcatttctttgatgaaaacgcccgcgtgctccggcaggcccaggcgctgaaggaaggcgatgtgcagacttttttgtctttggtgatcgcctcgggcgagagcagctggcgtctgctacaaaattgcgtggtgccggggcggttggagcaggggctggcgctggcgctggccctgagtgagcggtacctgcgcccggtaggcggcgcctggcgggtgcatggcggtggatttgccggcaccattcaggcttttgtgccgcttggagaggtagagggctacatcgccgccatgagcgaggtgtttggtgctaacagttgcacgcggctgggggtacgcaatctaggcgctatggaattaaaggcggaggcataagatgttcttcattacaaatgcaagggtcatgaccatggcgggcaagacctatgaaacgggctgggtcgccatagagaatggcaagatcacggcggtgggcgaagggaaccctaaagtgtcgcccaaagacgaggagctggacgcgggcggcgcttaccttttgcccggctttgtagatccgcattgccatatcggcctgttcgaggacgacctgggccgtgaaggggaggacgggaacgaggatatcgacccggtcacgccccatctgcgcgcaattgacggtattaatccggatgaccccagcttttgcgatgcgctggacgcgggcatcaccacggtggtcaccggcccgggtagcgccaatgtgatcggcggtcagttcgccgcgctcaaaacctatgggcggtatgtggacgagatggtgctcaaagcgccgcaatcgctcaaagtggccttcggcgagaaccccaagcgcacctaccaggatcaggaaaaaagcccggtgacccgcatggccaccgccgcgctgctgcgggagaatttggtcgcggcgcaggagtatgcgcaaaagctcgaggagggggaggaagaccccgataagcgcccggagcgcgacctgaagctggagatcatctgtcaggcactgcggggggaactgcctgttaaagcccatgcgcaccggcgggacgatatttttaccgcgctgcgcatcgcccgggaatttgggctggggatgacggtggagcacgctacagagggacatttggcggcagatgtgcttaaagagctgggcgcgcgggtgatcctcggcccctatctttgcggaaagggtaaagtagagctgcaaaacatgtcgctggaggcgccggcgcgcttggcaaaggccggcgtaccttttgcgctgatgagcgatcatcccgagacgccggtgcagtttttgcccgtgcaggcggcactttgcgtgcgcgcggggttgcgcgaagatcaggccctgcgtgcgatcactatcgatgcggcacggctgtgcggcatcgcggaccgggtgggctccatcgagccgggcaaggatgcggaccttgcgctgttcagcgcacatcccctctcactgcaggctaaagtgctggctgtatttgtagacgggcgcaaagtgcgctgagcaataggggttgcattttgtaaattatggcgtataataatctttgaattaaataccggtatatcttcagggcagggtgttattcccgaccggcggtaaagcccgagagcctttggcgccttcgcgccagaggttgaccaggttcatttcctgggccgacagtgacagtctggataaaaagaagataacctgatggaaaattggcgttgcttttgcggggcttctttcttcgggttcttggagacattccgggaacccgttttttataaagaaggaggcaatgacaatgaagaacgacaaggtaaaatggttgacaaaggtcggtatgctatcggccatcgcgtgggtgctgatgctgttggaattcccggtggcatttttcttcccaccctggctgcagatggatttgtccgatcttccggcgctgctggccggcttttcactagggccggtggcgggcgtgtgcgttgaactggtcaaaaacctcttgcacatgctgaccaaggggctttcctttggcggtgcagggcagctggccaatttcctggtgggcattgctttcgtttggcccgctgctatgatctacaaaaagcataagaccttaaaacgcgccatcatcggcatggcggcaggcgcgctgtgcatgggcgtggtaggcatgctggctaattattatattttgatccccgttgccttcccgggcaatgcgctcagcgggatgagcaccgccgccgttcccatcgcgggtgcgctgggcgcggggcagatgggctttttaggggcctatgtgatcttcggcgtgctgccgtttaacctgatcaaggccgtattggtatcgctgctcacgggcgtgctgtataagcgcttgagcggtattttgcaccgctgatcgagtttggatttggaaaggattggatcgtttcattcatgcgcaaggaagagtttatatcctataaccaggcgcagaccgaggatatcggcgcacgcctggcacaggcgcttacagggggagaggtgctggccctttacggtggccttggcgcggggaagacggcgtttacccgcggcttggcgcgggggctgggcatcgcccgcccggtcaccagccccacttttaccttgctgcaccagtatagggggcgtctggcgctcaaccactttgacgtctatcgcctgtcctcggctgaggaggcggaggatatcggaatcgacgagatcatggaagcagacggtgttacagtgatcgagtggccggagcgggtggaagaactactggatgataggaccatcgtgattaaaattgagggttccggggacgagccgcgtgtgctcacggttctttggccctaaaggaaaggcggaacgaagcgtgcggatattggcaatggatacctcggccaaggtttgctccgtggctgtgctggaggatggcgtcctgcgcagcgagcaatccaccaaccggaacctgacgcattcggaaatgctgatgcccatggtggaggccgcgctggatgcatccggcctggcgattaaggatatggacctttttgccgtggcaaaagggccgggatcgtttaccgggctgcgcataggggtctcgacagtgaaggccctgggccatgcctgcggcaagcccgtttgcggagtgatgacgctggatgccctggccatgaatgcggcacaccatgtgggtgacgtcgtggcgttgatggacgcacggcggggtcaggtttatgtggcgcgctaccggggcgatggccggcatatccagcgcgtgggcgaaccggaggccatatctttgcaggcgtatttgacgcgggagaccttttcgcaggatgtactgttgctgggggatggcgtagcgccgaatgaagcggcgatcaaggaactgctgggtcagcgggcgattctggcgctgccgcatatccggctgcagcgcgcggccagcatcgccgtgcttgccgaaaagatggccgatagcggcgagagcatggatcaggatgcgctacagcccctttatctgcgcctttcacaggcggaaagggagcgcgcgcgtaagctgcgcgagggggcaaaagcgtgatggtccatatcaggccctgggccggagaagatgtggcggcgctgcatgccttggaggaagcggcttttgaggcgccatggagcctgaacatgtttcaagaggagtgggaaaacgagcgcgcgcattactgggtcgcggaggatgaggcccacaggcccctgggctatgcgggctgttggctgatcctggacgaagtgcatgtgaccaatgttgcggtgcatccccttgcgcggcggcggggaatcggtaaaaagctgatggaacagatcatggtctttgcccgggagcgggcggcgcgcgtggtttttcttgaggtgcgccagtccaacatgccggcccgaaacctttaccggcagctaaaattcagggatgtcggcaagcgcccgcactactatgaaaacggcgaggatgcagtgctgatgacgctttggctgaacgataccgcgccgtgatcgcgaatataaaagcccgcggcagggaacaaaacctgcgtgccgggcttttcttttttgcctaaacaaggtaaaatagttgaatagcagccgcctgtatttcgtcttgtttacgacgacacggtgattttcgactatgggcggccatagataataagtagtagagggcatttgctctttgcaaacctgaaggttaggagcatcggtttgtttatcgatattgatgatattcgcatccattatgagagttttggagaaggggagcctatcctgctgcttcacggctggggtgggcagattgaaagctggggcccggtgatcccctcgctggcgcaggggcgcaaggtctatgcgctggactttccgggatttgggtccagtgcgcaaccgcctaagccgtgggatgtaacggactatacggcaatgctgctccggtttatggatcggatcggcttggaaaaaacagatgtgatgggccactctttcggcgggagggtgacgatcctgctatcggccaccgcgccggagcgggtgggtaaggtcatactggtggatagcgcggggctgattcccaagcggacatggcgctactactttaaagtttactcttataaggcacttaagcgtgtagccacctgcaggccgctggcggtgctgcttaaaggcgtgggtgtggatgcaaaaaagatcgttgccaagcgggggggctccagcgattaccgcgcgctgcccgagtgcatgcgcgcgaccttcgtcaaagtggtcaatcaggacctgcggccttaccttaagcagatcaaagcctccgcactgctgatctgggggtgcaacgatacggatgcgccggtgtactttggcgagatcatggagaaagaaatcccggatgcgggcctggtggtgctggaaaatgccgggcattttgcctacttggaccgattcggcgattttgataagatcgttaaaaactatattcattttgagaaaagaggttgattcatgttggatatgtttctatccccttgggtgtattcgcccgtgatcatcatcctggctgccctgctggcgctagggtgtaccaaaggctatatccatatgcttcagctggagagctatcagctgcctggttatttccgctggttcaagcaaaacgataataagctgtacacagcgacccttttggtagcgcttccggccgctatcgtggacgctgcctatacctttttgcgcaatcagctgcccgatgcttccgcctggtggggttacgcggtatcggcagtgctggtcgttagcgctctgatctttatgtcacagcagaaaaggcagccggcgaaaaagccgctggtttataccgcaagggtcaaacgcctggtggcggccatcgtcgtactggaggcgctggtactggccgtggccacggtcgtcatgtatttttataacgcgtcggccatcttcctggcgctgcgtttggcactgtatgccctggtgctgctgatgcccttctgggtggcgctggctgcagcggtcatgcagcccatcgaaagggctatcgccaaaaagtactttaaagaggcacagcgcaatattctggagaatgaggcgctgatccgcatcgggatcactggttcctatggcaagaccagcaccaagttcatactaggcaccatcctgggcgaaaaataccgggtcttggtgacgccttccagttacaatacgcccatgggcgtgacccgggtgatccgcgaacagctgatgccggatcacgaagtgttcattgcggagatgggcgcgcgccatgtgggggacatcaaggagatgtgcgagctggtaaagcccatgcacgggcttttgacctccatcggcccgcagcatttggagaccttcggctctattgaaaacgtggcggccaccaaatacgagttgatggaagcgcttccggaaaacggtattgctatttttccggatgacggcacccactgcacccgcctttatactacgacagaggggcttgataaagccctgttcggcgtggatgagggagaggggcgcctggtctgggcaaaagatatttccttcggcccggagggcagccgctttaccctttgcacgcaggatggtcaggagcaagaatgtaccacccagctgctggggcggcataatgtgcaaaacatcgtaggctgtgcggccatggcgttaaaactgggcctgacgctgcaggagattgccgagggtatcgctaaagtagagtcggtagagcaccggctgcagcttatccccggcgcaaatggcgtgacggtgatcgacgatgcgtttaatgccaaccctacaggggccaggatggcaatggaggtgctgggccagttcccgggccggcatatcgtgatcaccccgggtatggtggagttgggcgagcaggaatcaaagctcaaccgcgcctttggcgagcagatggccagcgcggtggatatcgccattttggtcggagagaagcgcacgcgccccatcgtagaagggctgatggcccagaagtttgatgaggataatatcaaggtcgtggcaaacctggaggaggcgacgcagctgctgggcacgctgacccgtgcgggcgacgtggtgctttttgaaaatgacctgccggataactataacgaataaccgtttataagaagggacctgaaagcaatgaaaaagcaagttgccgtatttttcggaggccgctcggccgagcacgatgtttccatcattaccgggctgcagctgatggataacgcggacattgcgaaatacgatctgatcccggtgtatatcacccgagagggcgcctggtttacgggagaggcgctgcgcaacatcgagacctttaagcattttgacccgcagacgaaaggattgctgccctgttggctgtcgcccgtggcgggcgagagggcgcttaaagcggaagttacgcgtacgtttggaaagaagatccagtcttatcccatcgatgtggcgatcccggccatgcacggcatgcacggggaggacggcacgctgcagggcttgttcgagctggcggatatcccctatgtcggcccggctgtactggggagcgcctgcgggatggataagatcgtcatgaaatccgtttttcgcgataacgggatccctgtactggacgctgtggcctttgaccggggagaatttgaacttgaccgggagggcgtgctagatcgcatcgagggagcgctgccctatcccatttttgtaaaaccggccaacctgggttccagcatcggcatctccaaagcgaccgaccgggccagcttacgggaagctgtagaagtggccattcattatgaccatcgcatcctggcggaaaaaggcgtgaaccatctaaaagaggtgaactgctcggtattgggcattggcgcccgggccgaaacgtcggagttggaggagccggtcagttggaaagaattcctcacctttgaggaaaagtatatgcggggcggaaaaggcgcgaaatcctccggcggaaagggcggtatggcttcgctggatcgcaagattcccgccgagatcacgcccgagcaggcccagctcatccgggagatctcgctgcaggcttttgcggcgctggattgctgcggggtggtccgcatcgattatattatcgacctggacgaggaaaagatttatctcaatgagatcaataccctgccgggttcttttgccttttacctgtgggagcccaagggcatgccttaccggcagttgatcgaccgcctggtggagctggcgcaggagcgctttgccatcaagacgaaaaacgcctttgcctttcaatctgccctgctgcagagccagggcggcggggcaaagggcagcaaacgctaaatgcttgaatgtctcagggtttgctgctataatgctaacggacaatttacgcgcgggcgcgtgcataacgaaagaaggagcatgttatggcaaaaattgcgatggttacgccgctggtagagatggacggcgacgagatgacccggatcatctggcaggcgatcaaagaaaagctgctgaagccttatattgatttaaagaccgaatattatgacctgggcctaaagcaccgcgacgaaacggacgatcaggtgacggtggattccgccctggcgacccaaaaatacggcgtagctgttaagtgcgcgaccattacgcctaacgcccagcgcgtggaggaatacggcttaaagaagatgtggcgcagccccaacggtacgatccgcgccctgctggatggcacggtattccgcgcgccgatcatggtggactgcattaagccaaacgtgaccaactgggaaaagcccatcatcatcgcccgccatgcctatggcgatatctataagagcacggagatggatattcccggcccgggcaaggtcgagctggtctttaccggcgaggatggaagccgccagaccttgacggtacacgattttaagggccccggcgtggcgatgggcatgcacaataccgatgcgtcgatctccagctttgcccgcgcctgttttaactacgcgctggatctaaagcaggatttgtggttctccaccaaggataccatctctaaaacttatgaccatacgtttaaggatatcttccaggaaatctacgatgccgagtttaaggcgcagtacgaggcggccggtattgagtatttctatacgctgatcgacgatgcggtagcccgcgtgatccgctccaagggcggctttgtctgggcgtgcaaaaactatgatggcgatgtgatgagcgatatgctggccaccgcctttggcagcctggccatgatgacctcggtgctggtttcgcccgatggcaagtatgaatatgaggcggcgcacggcacggtcacccggcactattaccggcacctgaaaggggaggagacctccaccaactcggtggcgacgatctttgcctggacgggcgcactgcgcaagcgcggtcagctggatcatattccggagctggaggcttttgccgaccgtttggaccgtgcgacgctcaagaccattgaaagcggcgtgatgaccaaggatctggccgcgctggccaagctggatacgatcaagaccgtcaacaccatgcagttcctggatgaagtgcgcgccactatggaggcgggcgaataagatacaaatttccgttaaagacgaaaggattggatgaaatgggtatttatcaaacctggatggaccgcgcccaaaacggcactgagcaggagcagcaagttttctggcagacctatctgcatcaggagcgggacgcgtatgccaagatcctggccgggaaaaatccctgcctggagggcacgcccgagagcattgccaaagagcttgagatggatatggacgtcatgggcgggtttatcgacgggatgaagaccagcctggtggacgagctggacgtagaggccctggaagccgatacgccggtcaagctgaacctggattgggaaaagttgttttacaatatgatggaggccaaagcggactggctgtataacctgccagagtgggaggacgtgctggatgcagagcagcgcaaagagatcacccgccagtggcgcaaagaccatatcgccgtgagcaccaagacggtgggccgcaatgatccctgcccctgcggcagcggcaaaaaatataaaaagtgctgcggtaaaaacgcatagttccagatggaaagcaaaaggcgcctcgatgaggcgcttttttattggcttaatagatttattgttcgtcttgcatttgttcttggtagagtcgcagggcggtcgaaagttgatcgggacaggaggtattgccgcggcagcggatgccgctaagcttctgggccacttcgtctacgctttgcccctcgcatagcttggataacccctggagattgcccgagcaaccggattcaaagctcaagtcgtggatatgcccgtcctgtacgcgaaagcggatctggcgcgagcaggtgccgcgggtcctataggtaacagctaccccgcgcgcggcgtccaaaggctcaactcgtagggcgttttggctttgcatcatggtatattcctcctggttacagcaatgtcgtttggtcatcctcctgcggtggaagagtggggatggggttaggattgagcagcgcatcaatcagcgcgcggtacgccaggccggagcgctttttccagttattacacagctctttggccagctcgcgcgtagcgatgttcaattccatttgaaatagcgtaacgccctgctccactgctttgagggtaaccagatattcatcctcgctgagcttttggtaatcggccaccacctggttttcttccagcagctcggctcggctggccagggcaaagtgcttgatttccagccgaagcaggggcgggatacgatctaaaaatagctcgagggcctggttgccttccaccgttaggtggaaagggccgctgcgactctgcccatccgggcaagccaataggctgttttccactagctcgaacagggcctgctgcaattcaaaatagtccagatacccggtctgatccatcaagcggatgagctgctcgttggtaggcggcatgcgcagctgctggatcaaatagagcaacagcagctttttgttggccaaaaggatattcatatccatcatttcgcttaaaacacctcttgtaatattataccctatttgctggggataggcgagagataaaggacaaataaaaaactctctctgcaaaacagaaagagttttataccgcccttaaggctcccgttatacagcgaaatctttcagctgctctaacaggtctgcacaatcctcgctctgaatttcgagggtgatcggcttgctcaaatccagcgagaagatacccaggatggacttggcgtctacgacatagcggccgctgcgcaaatcgatatcaaaggcataacgggatacgatatccacaaactttttgacgctctccgtcgtcgtcaactgaacggtaagagatttcatggtgacacctccttgctgttttaggatctcttcgatccagaaatagtataccacaaaatggcaatacattaaacataatttacttaacgtgacataaagaagtgcacaaaataactgcgtgagacatgtgcatattgtacaaagccggcggaatatggacagctgggcagattggccttgatatagaaaaacatccgtctatcgacggatgtttgttggtggggttaaatgggctcgaaccatcgacctctacgatgtcaacgtagcgctctaaccaactgagctataaccccatatcagcacggtgcttttttattatatcaaaagagtcaaaaaatgcaagccctaatttgggtttttcaccagctgcgtttggatttaacgccgaatagtatccatgtggatttaatgctatacgtggtaaaaaatactgcccttttcgggcttgtctccaccttgacacgctctgaacggcaacggtataatagaccttgcaagacaatcctgtggtgtgcgtcacgctttattttaatcctacagagttgatttgggagcttgggtctggcgagaacggccatgccctctacgggagggaaggccagcggcgccagtagagcacccccctgccacgaggcgggagttaaaatcaaagtgaacggcacaacggggaccgccctccggcgttaaaaccggggggcgtttttttatatgcttctgccttaatcttcacttcggcgtgacaagcgaggcgctttatgcgataataaaattatcgaaaagaatccattgtaaaggagacttgaaagatgctgtatcctcaattaaccgatagccggatggtgtttgacctaaatggcgtgtgggattttaagctgctggatgagggccagtgcccggcggtggatgggccgatccaggatgcgattccaatggcggtgccctccgcctataatgacctttatgagggcagggcgtttaaagagcacgtaggggatatggtttaccaacgcagcttttccgtcagcgcaccgatgctggaaaaacgtctggtgctccgcttttctagtgcgacgcatcaggccaccgtctatttgaatggaaagctattaggcaagcataagggcggttttttaccctttgagtttgagatcggccagcaggcgcggtgcggggagaacctgctgacggtgatcgtcaacaatatcgtcgattattccacgctgccctgtgggcggctggtcaccgaaaactacccggggctggcgccaatggtgcgcaattatcctaattttgactatttcaactatacgggcattatgcggccggtaaagctttataccacgccgcgaaattatatccgcgatataaccgtggtcgggcatatggacggcagcttctcctataaagtggatgtgcaaggagagggcgaggttgccgtagagatgctggatcccgataaaaaatgcgtgtttaaggcacaggggaccagcggggagggcatgatcgagaatgtacggctttgggcgcccgagcacccggcactttacgacctggtggtgcggctggtaagcggagatgagcaggacagctataccgagccgttcggtttcagggatatttcgattcagaactgccggctctgtttaaacggcaaaccggtttatcttaaggggttcggcaaacatgaggacagctacgttaacggccgcggctttaacgaggcgctaaacgtaaaagatgtgggcctgctcaaatggatcggcgccaactccttccgcaccagccattacccttatagcgaggagatgatgcgcctttgcgaccgcgagggcatcatggtgattgacgaggtgccggcagttggcctgcataccgcgtttaccgccacgggcatgctgggcggcgagcccaatggcacctggcgcaccttgcagaccgcgcagcaccaccgagatgtgatcaacgacctgattgcccgggataagaaccatccctgcgtcgtaatgtggtcggtcgcaaacgaaccggctagcgaggaggagggggccagggagtattttgagccgctgaccgttttggcgcgggagcaggatccccagcaccgcccggttacgatcgtgacctatgagggttccagtcccgaaaaatgcaaggtggccgaattgtgcgacgtattggttatcaaccgctatcgcggctggtatgataccgaggggaatctccctggcgcggcggctaagctgaaagacgagtttgaacgcttccacgcccgttgcccggagaaacctattatgctaggcgagtatggggcggataccattgccggcatgcacgacgccacgccgactctctttagcgaggaatatcaggtggcgtatctcgaggcgtacagcgaggtgtttgattcgctgccctatattaccggcgagcatgtgtggaattttgcggactttgccacggctgagaatatccgccgggtacagggcaacaaaaagggtatctttacccgagaccgccgccccaaaatggctgcacattacctcaaaaaacgctggacgggatttgaaaaggaatagggggactacctacgacaaaaaagccggcgcgatatttgcgccggcttttgctatgcatttttgtattttttgagaaacttatctttggtgggaaagttttaaattacgttgccctattaaaaagaccaagtgccctttaggatactcgacctttgtcctagtatgtaataataaggccagtcctgagcgcggcgctgatgtaaaacaaaagcgcatctactcatgtgaatgcgcttattgcgctcagagttggcctggttgttgttggggggtaattataggacttaaagataaagaaaattagcaatattaaatattaacagactgtaagcaatggagttgactgtaacttaatgtagttttcctatatcaatatgccatttctttgcgaatgcgatgtgtaaaaatgttccgtgaatattctgctttgcgctcaactctttgtggtagagtggtattttaaattttatttctcctgcatgaacccttgctgcccataaatacccttgctctttttttgtaagactgttgtcattgagaaaaggagtatttaaaacatccaagtactgcgaaaagacgactaggaatacatcaagcagtaaagaaatttcattgaggcaagcattcaaactaatataaaaattttcttgtttatatggcgcctgttgagaaatgttgctggcatgggtaaaaagagaatatccatgatacattcgttttcccatttcttttaatttggcttcactataaggcgcgccatcaacatctatttttactgctctgagtatctcagcagcagaaattctatgagatagattatctttgtaaaatgcagcattcaacttttttagtgcagcgatatcggaattaatgccagcttttgcccaaaccaaaaactcataaatttgtctgagcaatgcattagctgatccgatataaccgtctgaaacaaggaagacacaactctcaatgcaaacgagacaccgttgcaatgtcccccatatcaacataaattcgcatggctcaataattgcgcatgtttcgtgtaaatttttataaagtactttaatttgctttctaatatgtttaatcctttgtgttaggagtctttctttattttcatcaatagaatctataaatcgatctcttacccgcaaaatcgcccacctcttttgtcctaatatagcagattaggacaaaaaagaaaagggtgagtcctacaagaactcacccttggtcggggtgacaggatttgaacctgcgaccttttggtcccgaaccaaacgcgctaccaaactgcgctacaccccgaagaaatcgcgtcaacatccaataatatacactaatcgctgcgtaaaatcaagctctagttcaataaaaatatgcttttttgtggggagaataacggtaggaggggagaagaaacaatgaatttacaaaatggaggtttatctaggttgcaggttgtgatataatatctcaagatattgcaggattcgacggagaggaggggcgcaatggcaaagcgtaaaataaagcgtagccggcgcattaagccccgcttttttgtttttataggcattatcgtcatcattgccgttttggtgatatggagcgtgctgggcggggcgaccaagaccgccgccgtgcagtggggccagttgggcagtacgcacagcgccaaggccgtcctgctgcgggatgagcaggtgatcagcgccgagagctatggcaagattatatactttgcagctgagggcgagcgggtggccaaagacgccaagatcgccgaggtattccgtccgcagtttaccgataaggatttgcaggagtattatacggcccagcaggcggtgctcaaacagcagcagacgctgatgcaagatatcgtaaacgaggatctgaccaaggtgtccgatcaggtggatgcacagtttaccgagatcgaggcaatggtgcgcagcggagatgtgacaagctccctgcggttagagcgcgccctgaacagcgccctgcaggagcggcatacgacgtaccgcaacctcatcaccgaggacgatacgctgacccagctttacgcgcaggaggatgcactgcagtccaaggtcgatcaggcaaagaccgaggtggtcgctccctattccggggtggtcagcttttatctggacgggcgtgaatcgctgctcaatccggaatccatggcggagttgacgtatgagactgtggaaaccgtgactaaggatgcaaaggccaaaggttctaccgacgcgaacccgcagatgccgcttttcagagtcgtcaataacgccaagtggtatgtgttgattttatccgatggcggcgcggtggagcttaacgcggggcagagcgtgaaccttaatttctcagggtatgcaggcgtagattacgccggaacctgtacggatgtacggccttccggcgataacgcgctatatgtcatcgaaatgtcgcaggatatcggggcactgctcagcgagcgcaacctggatgtgactgtgggcaagcagatggaaggattgaaaataccggcatcagcgttgcaaacgcaagagggcgtgcgcggcgtttatgtaatagatggacaggctaagatatttgtccccgtcaaggttttggtggaggatggatccgcagccatcgttgaggcgttggggtctgaaaatcagctggaggtcaaccagttggtacagatcaagtagcaaaggaaaaggtgagatggaatgacagcgcagataccccagaacattgcgcaggttttccagcgaatggaagaggccaaggcgcaggcaggccggacggataccgtcaggctgattgcggcgacaaagacgcaatcgcctgaaatcattgacctggccgcgcaatatggggtaaaagaggtcggcgaaaaccgggttcaggagctcaaggataaatttcctgctgtttccagtgatttaaaatggcattttattggacagttgcaggtaaataaggtaaaatacatacttgagcaggttgtcatgatccattcactggatcggatagccttagcgcaggagatcgaaaagcgcgctgcaaaagccgggctagtcatgccggtcctggttcaggtcaatattggccgggagatgggcaagggcggcgttgcgccggatgaggtcgagtcctttatccgccaaatcgcgccttacgagcatctatcggtgcaggggctgatggccgttccaccggcagtgccggagagcgagcaggccaggccttattttagggcaatgcgcgagatgcttttggcgctgcgggacaagcagattccccgtatccaaatgcgggaattgtccatcgggatgagccatgattatgaagtggccatccaggagggtgccactatggtacgcgtaggttccgccatttttggcaagcgaaattatttagtgtaaaattttaaggaggagttcccttatggctggtaaagtgtttaacaaactgttggatatgatcgggctcgaggagaccgttattgaagaggaagatgaagagatgatggacgaggagtattacgaggaggaagagcaggagccggtgcggcctgcccgcaatactcatcgcgataaaggagggaaagtgttgcctatgccgcagcagccgtcgtctaacgctatgaagatgctggtttatcagccgatgagctatgaggatacccagagcattatcgacaatttgaagatgaaaaagccgatcatcgttaatttggagttgctggaggtagacatcgcccagcgcgtgctcgactttatgagcggcgcggtgtatgcgctcaatggcagcatccataaggtatccaagggtatctttgtgctggcacccatcaatgtggacattagcggaaatattccggaggagaacaaagggcgcagcaacagtagttttttctcgctggccaataagcgggaaggctagggataacttttggtaaacgcttggtactatgtctttcagggcattgagtattttttatcggcactgagctggtgtattatcatcaatacgctgctgagttggtttatggaacccgggcatccgatccgcatttttttagaccggttgacctacccgtttgtggcgccattccgtaagattgccatgcgcatcgcacggaacctgccgatagacctatcgccgttctttgccttgctcgctttacagttgctaaccgtactggtcaacgcgatcggcgttcgggtcggcatgaattattacttttagggataggatgagataacgttggaggcgaaagagcaggcgcgttttctggcacaggcggaagaccggctacgccgaacctcgcgcagcggccgaatcgagtatctctattttgccgatcccgcgatgcgtgcgaatatcaattgccagctattgccgcgctatccggactgccagattctatgggagggcggctatccaggtgcggagcgtcaggcggcggccctatggcgggatgacccggtacaggtggatctgccgatttgcgccctgtcctttgaatgggatgcgcgatatggcacgccggagcatcgggatatactagggtcgctattggggtgcggcatcacgcgcgagcggctgggcgatatcgtactggcgcagggtcagggctggtgcgtggtttccttggaaatagcggattatttgatcgccaattgggattccgctggcagggtgcgtctgcgcaaggtgtctaaagtcgattttgaccagatccaggtgcagcaagagccggtcaaagtgattcgggatacagtgctttccctaaggttagatgcggttttagccagcgcctttcaggtttcgcgcaatatcgcctctgaatgggtcaaggcaggacgcgtcaaggtcaattgggtggaatgtatgaaaacagaccgcgccctcgcacagggggactggttatccgtccgcggcaaagggcgcgcgcaactatacgaggtcggcaaccgcagccaaaaggggcgcacctgggtggagctccatcggctgggggagccaggggcaaggaggtagtgtatccaaatgggcttaaccaaggaagatgtgttcaaaaaagaattttcagtggtgttccgcggatataaagagcgggaagtggatgcctttttggatgaggtaatcgctacttttgatgaatgggaaaaagaaaaggcgcaggtgcaggaggatatgcaaaagctgcaaaagcgcatagacgattacgtcgcccttgaagatacgctgaaggagaccattgtatcggctcagcgcgcggcggcggatattaccgcgaaagcgggacaggagaaagaggatatcctggcacaggcgatggcggatgccgccgagattcagagcggcgcgcagcacgacgcggatgcccttttgggggaagcgacccggcgctgcgaggagatcgaagcgcaatatcgtaccatcgtcgccaaaggcaaggatatgcgtgatgcgatcatgaaactggtcgcctatcaaatgaaagagcttgaggatctgccgttgggcgcagagccggaagaggcaaatgcccccgaggaacaggaggagcaagcgtaaaaaggtgcagataagggcctggagatccaggccttttattttttaaaatatagcggcccttttctggatacaatgggaatatggcttaatagggatgatcagaagggctgggtatcgcatgttaaaagaaattaaagaagaggagctggcgcgcagcaaatggctggcggcagctgagcggatgacggaacggctggaacgtacgggtatcgcacaatatgtcgaacttcagtttgacctgaagcggatgctatggcgcagttttctctcgggcatcgcccggggattgggctacgtcatcgggtttaccgtgctgggcgcgtttttgctggtcgtcctgcgtaaactggcggaaacgccgctgggccaatccatcgtagggtggctggcaaactggctgcaataaaacggccggtgtcaatcctgtgggaaacctctaaaaattgcataatttgtatccgctgcgcctgcgccttttattaaggcgcgggcttttgctgctgcagcataaaatgttcgtatgcattaaatgcgtgggctgcttttaaggctaattgcgttgaagagccgggaactacccgtttatggcatgctttggcgattataacgtcagcttgcgcaaaatgcaggcaatatgtggtataatggtcgaagttcatcgcatggaggaaacttatgctcattctcattactattttgttggggatcgcgctagatcagggcagcaaatttgcagcgctgcagctgcgcgacctgccggggggaacctatccgttgatcccagatgtttttcacctgacctatgcggaaaaccgtggcgcggcttttggcattttgcaagggcagcagtggctgctggtggccatgacgctggtggtggtgacgattatgctgtttcatgtctaccatgaaaaggataagccccgcatctataaatttatggtagcctgtttgatcgccggcgcgctgggaaatcttatcgatcgggtgcgcatcggatacgtgatcgacttttttgattgccggttcatccagtttgccatctttaatgtggccgatacgctggtctgctgttcagtagccgggctgtgcatttattatatctttttctatggcaaggaaaagcgtgcccttcccggggtagatgaacagcctaagggcgattcccatgaatgagcccatgcactggcgggtagaatctgaggcggcaggaacccggctggatagctgtctttcccgtcttacgggtttgtcccgcgcccatgtacaaaagttgatcgccaacggttgtgccagccgcaatcgacgtgtctgcaaaccctctgataaagtgcaggaaggggatcttatcgcgctgaccataccccaggtccaggaattagcggtggaaccgcagaatatacccttggatatccgctatgaggacggggacgtgatcgtagtgaataagcccaggggcatggtggtacatccggcgccgggcacgcctgaccatacgctggtcaatgcactgctttaccattgcagggatctgtcgggcatcggcggggtactgcggccggggatcgtacatcggatcgataaagatacaactggcctattgattgtggcgaaaaatgacgcggcgcaccaggccctagcggaccagatcgccaatcgaacctgcggaagaatctattgggcattggtggagggtaacgtaaaagagtatgaaggacagatcgtaacgcggatcggccgccatccgacggatcgaaaaaagatggccgtgctgcgggagcaggaggggcgagaggcggtcacccattaccgcgtactgcgccgctatgcgcgggaaacgctagtggaatgccgcttggaaaccgggagaacgcatcagatccgcgtgcatatggcgcatatcggccatccggtgattggagatgcgacctatggctacaaaaagcagcgttacgccctggaaggacagctgctgcatgccaaagagctgcactttatccatcccgctacgggggagtccgtttcggtgcaggcgccgttgccggatgattttgccttactgctccgcaaactggaagcgcagttgccaaaaaatacggccgaaaatgacgaaaaataatagacttttgccttgccatgtggtatgatgccaaaaggaaatgacctttaaatcggtaccgtgagaccggcaaggtgtaaagtggattgaagtaggcgtgtgccttgccgtacgacggtaaggcgctttttttatgtggaagtgagggggagcgtatgcgggaaaagaatgtattgatggatgaagcggctatgaaccgtgcattggtacgggtggcgcacgaggtgatcgagcgcaaccacggggtggacaagctggtcatcgtggggattcagcgccgcggggtgccgcttgccaaacgcctggcggataatatcggcaaagtggaggattgtcagatccctgtgggcgtcctggatattaccttttacagggatgatttatccctgctcaacgagcagcccacgctgaacaatacggatatcccctttatgatcaccggccagcacgtgatactggtggatgatgtgctctacaccgggcgcaccgcccgggcggcgatggatgcggtaatggatatgggcaggcctaagaccgtccagctggcggtactcatcgatcgggggcatcgggagctgccgatccgcgcggattatgtgggcaaaaacgtgcctaccagcagcagcgaggcggtccaggtgcatgtgcaggagttcgattgggagaaccgcgtggtgctttgcgaaaagtaaaatgctttgaaacggcctggggccgtttggggatagacgatgcaaaatgaggaggagtaagggatggacaacacaaagaagaactgggggcagatgacgctgctgggcatccagcacgtatttgccatgtttggcgccacggtactggtgccgctgctgacggggctggatacctcggtggcgctgttttgcgccggcgtagggacgatcctgttccacctgatcaccaagcgcaaggtgccggtattcctgggttccagctttgcctttatcggggcgatccaggtggtggccaacatgatgagcggcggtgccgagatggggacgcctgaatacatggtcggcctgcaatacgcgacaggtggtatcatctgtgcgggcgccatgtacctagtgctggcgctgctggttaaggtatttggctccgagcggatccgtagctttttcccgccggtggtcacaggccctatcgtcatcaccatcggtttgatgctggcgccgacggctatcagcaacatcgtaaacgatgcggccaccggtgtggcgttggagggcatggcgctgctgagcaactggatcgtcgccgcggtcacgattattacgatgatggtggtctcggtctttgccaaaggtttctttaaaatggtacccattctgttcggcatcgcaggcggctatatcgcttcgctgatcttcacctggtgcggcgtacccatggtcaacttccagtctattgctgaggcgcagtgggtggggctgcccaacttcatgctgccgctgttcgattggcgggccatcgcggtcatcgcgcccctggccatcgtgacttttgtcgagcatatcggtgatatcagtgctaacggcgcggtcgtcgggcaggacttctttaaagaccctggcctgcaccgcacactgatcggcgacggtgtggccaccatgtttgccggcttgatcggcggcccagccaacacgacttactcggagaataccggcgtgctggcggcaacgcaaaactataacccggctacgctgcgcctggccgcggtcttcgccatcgttctgagcctggtgggcaaattcggcggttttttacagacgctgcccagcccggttatgggtggcattagcatcatcctgtttgggatgatcgcctcggtaggcctgcggacgctggtggaaaaccaggtggattttaagaacagtcgcaacttgatgattgtggcggtaatgttggttatgggattaggcggtgcagccttccagatcagcgatcaaatcagcattagcggcgtggcgctgagcgccattatcggcatcgtgctcaacaaagcgttgccggagcggatcgacaaagcggagaaataagacttgcggggggcggcgcttggagcccgctccctttttataccggccctgcgccgcatgaggcgggggatggttttgaaatgataaaatggcgatgataaaagaaaggagtgcaaccatggctttagaatgcaaagatctgctggggatgcaatacctgaacccggagcagatcaatgagatcatgcatactgccgagcagatgaagcagattttgctgcaaagcagcaaaaaaaccccgcatttgcagggcaagtccatcgtaacacttttttatgagaacagcacccgcacgcggatgagctttgagctggctagcaagtatatgagcgcggccgccgccaatatttcggcctctacctccagtgtacaaaagggggaaacgctgatcgataccggccgcaccttggaccggatggggacggacctgatcattatccgccatcccatgagcggcgcaccgcacctgctggccaaacacgtaaaggccggcgtgatcaacgccggggatgggatgaacgaacaccccacccaggcgctactggatctttacaccatgcgcgagaaaaagggagcggatataaagggactgcgcgtggccatcgtgggggatgtggcccacagccgcgtggcgcgctccaatatctggagcctgaccaagctgggggcgcaagtgcgcatctgtgctccgcgcacgctgatgccggtggaactggaaaagaccggtgttcaggtgaccagcagcgtggaggaggctgtaaccggcgcggatgtggtgatgggcctgcgcattcagctggagcgtcagaaaaaggggctgttcccctcggtaaaggaatataacgatttttatggccttacgcctaagcggatcaaactggcggacccggaggtactcatcatgcatccaggccccatgaatcgcggggttgagatctcatcgcaggtagcggacagcactgcctctgcgattgacgagcaggtgaccaacggcgttgcggtgcgcatggccctgctctatatgctgaccagaaaggggagtgtaaaatgaaactgttgatcaaaggcgcgcacgtgatagacccttcgcagggaattgacggcgtgctggatgttttaattgaggaaggaaagatcgcgcagattgccccaaatatcgattgttcttctgacgaggtcacagatgcctctggattgacactgatccccggcctggtggatatccactgccacctacgcgaccccggcctggagtataaagaggatatcgtttccggtacgaaagcagcggcgcgcggcggttttaccagcgtgtgctgcatggccaataccaagccggtggcggataatccggcggtgatcgcctatattcgtgacaaggcgaaaaacgagggagcggttcacgtctatcccatcggcgcggccagcaagggtttggaaggcaaggagttggctgagatcggcgagatgaagcgcgccggtgcggtcgccatctccgatgatggcaagcccatcatgaacacgggttttatgcgcttggcgatggaatatgccgcggactttgggctgaaagttttggaccactgtgaggatagcggcctggtggacggcggcgtgatgaacgaggggtacgtatccaccaaactggggctgcgcggctcggtcaatgtagccgaggagattcatgtggcgcgggatatcctgctgtgcgaacagtacggcctatccgcccatatctgccatgtttccactaagcgctcggttgaaatggtgcgcctggcgaaaaagcgggggatcaagatcacctgcgaaaccgcgccgcactatctggcggctaccgatatctgggtcgcggagaaggaatatgacacagctacccgcgtcaacccgccgctgcgcacaaaagaggatcaggaagagcttattaagggcctgtgcgacgggacgatcgattgtatcgctacggaccacgccccgcaccatcaggatgaaaaaatggtagaatacgatctggcggcctccggtatctctggatttgaaacagctttccagctgtgctatcgggcgctggtgctctcgggtaagatggaactaaaccaactgatccggctgatgacggtgcagccagcacaaatcctcaacctgccggctggaacgctggctgtaggcgcggccgcggatatcgcactggtggaccttgactgtgagcagacgatccgggtggaagacttcctttcaaagggcaaaaattcgccctttgacgggatggcggttactggccgcgtagtgcatacgctggtggatggcgagtgggtctaccgggatggtaacattgccccgcgctttgaggactaaggagggaataagcatgattgaccggctgatcgacgcgatcattgaaaagcagaatcccacagctgtgggtttggataccaagtacgactatttgccggaggatttccgcaaggctttgatggctggcgccaccaaagcggatatggctgagcgcgcggccaaagcggtattcaactttaaccgagagatcattgacgcggtgtgcgatatcgtccctgcggtaaaggtgcaggtggcctattatgagatggcgggcctgcccggcatgcgctgtttttatgatacgctggcctatgctcggcatcgagggctggtgactattgccgatatcaagcgcaacgatatcggcgccactgcccaggcctacgcggccgcttacttgggcagcatgcccatcgaagggaaggcggtggaggcctttccggcggattttgttacggtaaacggttacctgggtaccgatgggatcaagccctttgccgatgcctgccgggagaacgacaggggcgcctttatcttagtcaagacatcaaacccctcctcgggcgaactgcaggatctgaaggtggaagatggccgcaccatttacgaggtgatgggcgaccaggtatgccagtggggcggtgagctggtcggcaagtatggctatagcgacctcggggcggtggtaggcgccacctatcccgagcagggcgaggcgctgcgcaaaaggctaaagagcgtctttttcctgattccgggttatggagcccagggcgcgggcggtaaagagctggtgggctgctttgacgagcggggcttgggcggcgtggtcaacgcctcgcgcagcatcctttgcgcctataaaaagcaggataccacggattttgccctggctgccaaacgggaggccgaacggatgaaggccgatatcgcccaggcgctggaacaggccggaaagcccatgataaccgaatgcgcgaaatagaggagtgccctacatgaaggatattgaagcacgcgttataaaaaatgagccaatcgcaagcggcatctatgagctggtcgtggagttgggccaggaggatattggccgggtacagcccgggcagtttgcgcagttgcaggtatcaaacgcgccgcagctgctgttgcgccgtccgatcagcatcaatagctatgatgaagcgcatcataccatgacctttgcctatcaggtaaagggagagggaacggctatgttggcacggatctcgccgggccagcagctaaaggtgctgggcagcctgggcaatggtttttggcccaaacccagtatgaaaaagatttacgcggtgggcggcggcatcggcgtggcgccgctcaagtattgccttgaaaaatggccccagatcgcctggaaagcctatctgggtttccgcagcgctgaatttgtctatcagctgtctcagtggcaggcgctctgcccggatggggtgaccgtggccacggaggatggttcgctaggcctgcgggggtttgccacccagccgctggccgaggcgctggaaaatgacgattggccggacatggtaatcgcctgtgggccgctgcccatgctgaaagccctgcagaagatcgccctgcagtatccggatatcccctttatggcctcgctggaggagcgcatgggctgcgggatcggcgcttgtctggtgtgtaattgcaagattcgtaccactgaaggagagcagacctatcgccgtgtctgcgccgatgggccggtattccccctgcgggaggtgatttttgaatgagcaagccgaatctgaatgtagaagtgtgcggcgtaaaattcaaaaacccgctgatcgctgcctcaggtacctatggctttgggcgggagtttaataagctatacgatatcgctacgttgggcggcatctcggtcaagggattgacgctaaaaccccgcctgggcaacccgccctcccgcatcgcggagacgcctatggggatgctcaacagcgtggggctgcaaaatcccggagtggacgcctttatcgccgaggaactgccctggctcaggcagcgggacctggcggtgatcgccaacatcgccggctccacagtagacgattactgccagatggccgaaaagttccagaatcagccggtggagatgctggaactaaatatctcttgtcctaacgtgaaggagggcggcgtcgcctttggaacgcggcccgaatcgattttagagatcacccggcaggtcaagcggcacgctatgcagcccttgatggtcaagctctcgcccaacgtggcggatatcggcgaggcggcgctggcggcccaagaaggcggtgcggatgcgatctcgctaatcaacacgctaacgggcatggcagtggacgtttataagcgcaggcccattttggcgaacgttacgggtgggcttagcggtccggcagttaagccggtggcgctgcgcatggtctaccaggcttcgcacaaggtcaaaatcccggtggtgggcatgggcggcatcatgacgggggaagatgtggcggcctttatgctgtgcggcgccagcgccgtcatggtgggcacagccaacctggcagacccgatggcttgcccgcgcatcctgcgtgagtttgaggaatatctggcgcgtacacaggtcagctgcgccagcgatttggtgggcaagctggaagtatagcctaaagcctataaaaaaagcaggcgttatcgtaacgcctgctttttgcatacaatgaattgcctgtgctatactgaaaaaaaacgaaaaacgatggcttcctttgaggtgacgataatggcaaatgtacgcaacaagaaaaaggataaaaaagtgcgggcgcctttcccggtcagctacacgctgggagaggagctgtgcaattccatttcccatggcgtaggggcggtttttgccgtgctggcgttggtgctcatgctggtacaaaccgtgccgcaggggaacccgtggaagaccgtatccgccgccgtttatggggcgtcgctcatcctgctgtacaccatgagcacgctgtaccatgcctttaagcccaacctggccaagcgagtctttcgcatttttgaccactgtaccatttattttttaattgccgggacttataccccttatacgctcaacaccctgcgcgggccctggggctggtcgcttttcggggtggtatggggcattaccctgctgggcgtggtgctaaacgccatcagtatagaaaaattcaaggtcttttccagcatcagttatatcgtgatgggttgggcgatcatcctggcctttaaaccgttgtacgataacctggcatcaagcggcctatggctgttgataggcggtggcgtgtgctacacgctgggcatcatcttttacgcgcttaaaaagtggcgctatatgcactccatctggcatgcttttgtgctggctggcacggtgatgcactttttctccatctatctttacgtgctggtctagccttcaattagagccatcgcctcgatctgtgcggcctggggcgtaacgtacagcgtgcgctggtggtcgtaaatcaccatgcccggtttggcgcctgaaggcttacgcacgtattttcggggcgcataatccacggcgatattgcccgacccccgcgaacgggaataccatgctgccagcagcgcggcttgttgcagagtctcgggcgttacctgattggcgctttgccgtacgatgacgtgagagccgggcgcgtctttcacgtgcagccacagctcgtcaggcgcagcggtgcgcagggtcaaccggtcgttttgcaggttgtttttccctaccaggatatcgatgccctccggcgtttggtagtggtagggcttggaggccgcaacgcgggcctttttttgtttggagcgggcatggctggcattaatatagccttcgcgctccagctcctcgcggatctcggagagctcctcattcgagtcgcatttatccaaattatccagctgcccctccaggtaatcgatctcatcagccgtctgggcgatctggagggtaagctgttctaccgtggtcttggccttgttgtactttttataataccgctgcgcgttctcggaaggggtaagctgcacatccatcgggatctccagcgtaccgcactccgggtcatagtagttcgtgacccgggcagcgggcagccccccttgcagctggtgcaggttggcggtcagcagttcgccatacagccgccaggtatccatctgagcgcagtctgcgatctgctcttgctgcagggcgcttttttttcggcagcgttccaaatgggtcgatacggcatgcaccatggcacttttgcgctgcttggcccgcatctgccggtcccgcagcacataaaagtcatccagcgctttacaggctgaagggtagctcttgagatgatcaaaatcgtagccgcgcggctcgaaggggaagatctcggccggatgcttctctgcatccagcaccagcgtgggatgaaaagcacccgcgcgcatttcgacaaaaaaatccgcaatgcgccggacgatgctgtcaaagcgcatggtctcggcatcgggtatggccgcatgctcgtctccggcgcagatcaggctgatttgcactgcggtagagggggcaaggcccatcacctgggtttgaagatgcttggcaagccccagccctggcgcgagggataaaagcgcggcaaggccggcttcatccagggtaagcgggttgaccttgtcctgggaagggggcagcgtataatccatgccaggtaaaatctgtcgtacccggctcatatccgcgctgacacggtgggctgaatcgatgatgcggccgctttcgtccagaaaaatgatgttgctgtgccgccccatgatctccaccatcagccggcgctccaccaaatcgcccaaatcgttcatcgcttcaaaggtgatctccacaatacgctccatctccagctggcgcatccctaacacacggctgccctgcaagtgcttgcgcagcagcatgcagaacatgggcggttgcatggggttgggcttgttatgccgggtcaggtggaggcgcgcctggctggcgttcgccgtcatcatcagcaagcggttttgtccctgcgagcggatcagaatatggatctcgtccttttcgggctggttcactcggtctacacggccgccgataatcgcctttgagacctcggcgcatacggcgtgcagcatcaatccatctaatggcatatttcaaaactcctttacggtccggcaagataatcgttttaatagtctaatatgactattatactgtatttgcggcatattgaaaaaggtttttaaattgcctgccttgtggcaggcgtgttatagtgttaggtagaaaataagtttccatttcaggaggaaaaaagatgcgtttagatggaagaaaaccggatcagctcaggccgctaacgctgattccaggttttatcagttcggccgatggatcggtgctgatccagtgcggccagacaagggtaatctgtacggcgatggttgaggagaaggtgccgccgtttctagaggggaaggatcagggatgggtcaccgcagaatacgcgatgctgccgggttctacccgcacgcgcaaggcgcggggcggctcaaagccggacgggcgtggagtggagatacaacggctgatcggacgctcgctgcgcgccgcggtcgatctgcaaaagctgggcccgcgcaccattacgctggattgcgatgtaattgaagcggatggcggcacgcgcaccgcgtcgatctccggcgcgtatgtggctttggcgctctgctgcgataagctgttgcagcagggattggtgcaggagaatccggtgatccatcaggtggccgcggtttcggtaggaaaagtggaggacactgcggttttagacctgaattatccagaggacgccagggcacaggtcgatatgaatgtggtgatgaacgagcgcggcgattttattgaacttcagggaacgggggagcacgatacctttgatgaggcggatcttcaggcattcctgcgtttggcaaagctggggatcaaagagatcatggcggcgcaaacagccgcgtgtaccgaaaacgacgcgcaggagggttagggccatgcaattggtgatcgcttctaataacaaggggaagattcgggagatcaaggcgatcttctcgcagcagtttgaccctatcgtatcgctaaaagaggtagggatcgccttagatacgatagaagatgggaatagctttgaggctaatgcactaaaaaaggcgcgcgaagccgccgcggttttgaaacagcgcggcattgaggccgcggtactcagcgatgattcggggatcgaggtggaatatctgaatggtgcgcccggcatttattccgcccgatatgcgggggaacccagcgacgatgagcgcaataaccaaaagctgatcgcagcgctccgaggggtgccgccagagcagcgcggcgcgcgctatgtggcctgcgtgatcttactgatacctggggaagaccctatcgtggcccatggctattgggcgggacagatcgccttgaccccggcgggcgagggagggtttggctacgatccctacttttatttgccggaattcggctgcacagccgctgagctgagcgcgcaagccaaaaatagggtcagccaccgggcaaaggcgttgcagatgctctatacacgatatgaggcaaaaaagaaatgaggattctgatcgttagcgattcgcacggcaggatcgcgcccgcgctgcataaggcgcgggagctgggggaactgtcgctattgctgcacctgggcgaccatggggaggacggggagcaaatggcacaggccttgaagatcccttgccgctgcatacagggcaactgcgatttgggcagcggcctacccgaagaaatgcgcctgcctttgccgggtaatggttggctgatggcctgccatgggcaccggtacggggtaaaatacacacttgaccggttattttaccgcgccatggagcaggatgtaaaagtggcgctttttggacatacccacaggcggtatttgcagtgggagggcggcatcctgctgcttaatcccggtagctgcgcgcagcctgcggatggggaatgttcaatggcgctgctggatgtggatcgggatcattttgaagcccaccacatttttttagaggaaatacccgacggcgaataatgtatagtttttgctaaaaaaatccgaaaaaagagttgacaagccgggccctcgctgctataattctatcttgtcagccggttatgcgtgcgccctactaagtgaggacggttgccacactcacgctttcggtgcaagggttttctgctccaacaaggcttatgcgcctgtagctcagttggatagagcaacggccttctaagccgtgggccaggggttcgaatcccttcaggcgcgccagtaaggttgtttgtggtgagtatagttcagcttggttagaatgccagattgtggctctggaggtcatgggttcgaatcccattactcaccccatttttttgttggggtgtagccaagttggtgaaggcacgggactttgactcccgcattcgtaggttcgagtcctgccaccccagccatttacctatgacccattagctcagttggcagagcacttgacttttaatcaaggtgtccggagttcgaatctccgatgggtcaccattaaccctatgggatgcaccttgtggatatgcgggcgtggcggaatggcagacgcgccagacttaggatctggtgccctcgggtgtatgagttcaagtctcatcgcccgcaccattactttcatgcggtagtagctcaatggtagagtgccaccttgccatggtggatgttgcgagttcgagtctcgtctaccgctccaatttgcgggtgtagctcaatggtagagttccagccttccaagctggctgtgtgggttcgattcccatcacccgctccactattagcttaaatacccaattgtggatcgctagctcagttggtagagcacctgactcttaatcagggtgtccagggttcgagcccctggcggtccaccagctaaaaccccagtaaacagtagtgtttgctggggttttgctttgccattatacaacggtgggcagcccatttaccgcatttttaccgcataagttttcattgatctctcgccagcttcgtatttttaatagatccttgtcgcgctgcgcatcggatacatgcacataataccgcatggtgatctcgatactcgaatgccccatgagctcttttagatgctggggcgggatgccagcctccgccatcatcgtggcatagttgtgtcggagaatgtaaggtgtaaaaccctcgacgactgtaaggttaccacgcgcgcccgacaataagttcatgagcgcctcggcctcgcgatacaggcgagtgtattcgctcttatttaaatgcctagagcgatccgacggggatggaaagaccaaatagtcgacttgctgcaaatagccgcttagaagggattctagaggttcagggataggaacagtgcggacgctggattgagtcttacagcctttgagcacgggcttatctttgtcaaacacaactgctttatctatgcttatctctttgctatggacatcttggcgcgttaaggcgcgcgcttcctccgggcgcatgccagtatagtatagggttgcgataaaggctatgagctccgcagtcatttgatcgtcaggcggggaaaccattaagccgagaattgccgaggtttcaaaggcggtcagggcccgtttttgttccctgggcttcgatactttttgcttgagcttaaggctagtggatgggtcggaccgcaggagcccatccgcataggcttgggcaaatagctgtttgagcgtcattcggacaatactcggagtgcgtttggtgtaacagggattgccctccgcgtcttttttatcggtgagtttattcaaaaaagcctgcaaatggctttttttcacatcccgcaggcgaatgcctttgaaggcagggtaaatatgagtgtttagagcagtacggtacatttctcgggtttttacttcgtcggatccatgataggcctcaaaccattgctcgccccacgcctgcaaggtgatctcatcatcaacgttcagaaaaccgccctccagatcgcgtttaaaatcggttatatttcgctctagttcggcgagtgtcttgccatatatgcttttccgaatgggcttcccgtccggtcggtattgaccagtaaaaatatccttacgatacagaccgtctttccgttttgcgacttttgcctttggcatattgaccctcctataattgattaccaggggagggcatgctataattagatatagcaatgcccggtagctcgtggttttgcttctttggcccgtctcctgctgcaacagggggcgggtcgtttatgtttacttgttttttgagtctagcatctttttagtggccctatcaaagtctgaaatatattcacgatcctgaattatcctaaacttttcatattcatctatggccaatttgttggcgacggccctcgatactgtgcccggatggtttaggatttcatactcgttgaagcctagaaaggcgtcaagcctttcaacccaatccgccatagccataggacgatttcggcgtgcttggttttctgcataatccagatacatattgacgatttggtttaattctccgatctcctcgtcgtataaatagtttttagaaacagtgacgtcgctctttaacaccttcccgtctggtgagtttttccacgtagtgagtcccatatgctctttggcgctatcggccctattcgatattatttcaggcgcagtttgccctgtaatagcaaacagcaatttgttttggacggttttaaaaaatttatcagtaatttcgctgtcccttcgatagtcatagctgcactctttgtagatatcggtaatcttttgataaaagcgcctttcgctcgcccggatctctttgatacgctcaagcagttcgtcaaaataatcctgcccaaagagacgaccgtttttgagcatatcgtcattcagcacaaaccctttgatgatatattctttcagagtgtttgtagcccattgcctgaagcgggtggctttttttgaattaacgcggtatccaacggcaataattgcgtcaaggttatagaactgggcatattttgtttgggtttttccttcaatcgcaccatgctgagtggttatttccattttggaaacaaccactttttcatcgagttccccttccacaaaaatattctttaggtgcttactaatggctggtatttgcacatcaaacagttcggccatggctttctgcgtaagccaaaatgtttcgtttgcgtaatagaccgaaacattgactttgccttcttcggtttcatacagcaaaatattagctgttgtaatattgtccatactgcctcctgtaattagcggctcgggagagcaaagccctcccgccgccatccattagccttatttgatacgcctaagctttgggtacgcgaccaagtccttcaaccgacactgagcctgcagcagcttccaaatttctgcaccgctaacgctgatctgctcgccaccttggcggagtgttagcctgctgtccttgatcttcatggttacattggatttcaccttcatcagaaatccctcctgcgttttactcagccacctctggcggccggcaaaccttgcagggttctttgcccaatctcaacgcctcggctaaagataccgtcgtgatgttggccttatcccgtacatattggcagtccggtaaatggtatttatcgccgctggcggtgatgagcacttcagcggcagtcaaatctacaggctgcccattctccacttggataccagctgatcgggaagcccccgtcgccggagctgccgaaatggttccgtagagcacccatgcaatgcaaaagaccacgcacgcgccagcgatggcagccgccgccggccagtgccgaataggggcaagaggcttagcctgacagtatttgaataccaacttggtgaaatgctccgcatcagcctcgtcctggtccattaggctttcaatgtcgtgtcccaggaggatatgccccaattcgtgaaggagtaaatgccgtaggtccgcaaggtgagccttgttaacgcaaatgattacatcccaacccatccgcaaactaaaagcttcacgccagcggatatagtttttcgcagcagggtatagctctaaaaattcgcagcagtcgttttgatcgaagatatagaccttgaacctgtttctctccagataattcttgaccgattctgtagtagctgctccgagctcgcgtgcaacgtcttttgctttacgccttacgatatccataaggacacccccaaaatattatttgggtacaatcttcgacgttgtaatacaaaaatcttgcaggatatatcaccgattttattatgggtgaggtatgcaggcgttagtcctttcggttcttttcgttttgcttccgccagaattcttctgcctttttctgctggtctttggtttgaatgatcgcgtcggaatcgccgccataggctgcgattcccccgatggtgggcgcgtcccgctcgatgatagcatcggtgtagagcagtttggctttattatagagataatcctgcgcagatggtcccacgcctctgtaaaacttcactagatcctgctcgcgggggacgagagggactgtagaagacgctgagctggacatggggaggtctttcttttcaatcagctcagactttttgacaccaaagtaatcagccaacttttgaatttttcccatacgtggaatagcctgccctgtacaccatgtattaaatgtttgcggaataacattgatggcatctgcaacctctttttgggattttccggtcgcttccaaaagcctatttaaattgtccgcaaatgttttacgttgctcgctatctgtcatattagcacctcttgccattattataaatctagtttaaatggattgcaagacaaaaattaaataaaatttgatttttagtattgacatccaattaaatttgatttaacatatgggtatgcgatacgaaaggaggtagttggcatgggagcaataaaaatttcacttgccgcggcgcgggtaaatgctggatttacgcaggcagaagtggctgctaaaatgcgcgtcagcaaacaaaccatatgctcttgggagcgaggtaaggcctcagtgaaaattgagcaggggattgcgctatcaaagttatatggtattccgattgaccatattttttttgacgataaatccaattaaaatggatttttggaatttcgtaatgaagatgtatgacaggagaagggagcgagaggatgacggatttgaccacaagatttaacagtaacaacgaaaaggttttcgctgcgatcagcgaagccataggggcgctggttgcggatacggaaccgtgggctagaagcgaagcggtatttgaaagaagaaacgcaattttagagggttataaggaaaaaattctcctctttatagatcttcaattcaacgcgtaccgtgaagcctatagccctaacgatgctttgacgatggcttgtgagacagatacgacaatgggcaacgcaacagaagtgccgaaaggctgaatcttcttcttgattttctcccaaacgtttttgtcgcggacattatcaagatattggtggccctcaaaagtgatcgccgaataaagggcatcgataaagtttgaatctgcagccaatatatgtacttcaatgtagccagcttctttgagtttttgagtggtataggcgatatctgacttaggataaccaaccattctaggagcaaggcatacacggtggaaggacagggttggaaattcgagatcgcgtccaaactgtagttcatcttcaagcgtcaggagaagatcacgtacacaatcaaggttaaatttcaaggataagacctcctgttatcgtttagcttagcgtactacggccaaccagccggaacaagagaaaggagcgagagaatgattaatttgggtgtacagctaaaagctgatggcctcaccgaaacattggatgacctgaataggctgatcgacctgcttcaaaaggcaaacgacctcatcgaagagcttagggggagagaggtaaaggtacaaattatcgggacttgcgagtcacaacaggatactttaacatgagcatgccctcaatctgctgaataaaaagctctgcgtacgctttggcctcatcataccctagattttcatactttttttcatagtgggttgcgtcgttaccaaggaaacgcacaacgtcggcagcatttattaaagaagcttggttaagtcggcttattgcatcgtccaaatggagactggatatttttttctcgtcctgctgctcttccacgatcaagtagtccttgattaagacctcgagtgctgtgcagaaacctataatcgcgatatccttacagcctgaatcggcggctaaaagagattggttatagagggaaataaagcgaggcgataatttggccacacgatcgtttgtgtatgttgctttcggatttgggtatatgccaatgaaatttgtagtacgctcgatggtatttagtagatacacaacgaggtacagctttaaacaactggtacaaccgtatatggcaaccccatacacgctattttcgtcattcggaaaggttttgtactccatcccagttccgtctgtgctaatgccgcaatgggggcataccgtcggcttgggaagcggaaagttatatttggagccaaaggcagtgctgactttctttataaacttttgttccataattcctccaaaattaaccaatgatacaagatgttgtgtcttgattgagattatatcacaaaatacgggatatttcaaggaggtagtgcatgcgggcagtagataacaagctagatgagctttgcggagctaaaggagtgagcttagtcaagctggcggcagagaccgggatagcttattccgtcttgtattacacagcaaaatgtgagcgggatattcggaccagcacggcgataaagatcgccgactatcttgaatgtagcttggatcaactatttggccgcgattaagcggtgagaaaggagcgtaacaaatgcctggattaaacagtgacgatcgctatatcacgattgcagaattctgcagcaagtattcaatctccagggccaccttatatcagctgacccatgcgcgggatttcccgtatgtcaaaattggcggagcggtccgcataccggaacaaggagcccatgaatggatcgtagagcactcggaaaggaggggagcagtatgaacgaatttttatccggggtatgcttcggcatcgctggaatggcaaccctggtgctgttggacggcatagcccgtaagctgattgccaaagcgaggcgcaggcgggcaaagcaacgccgggagccggtgcggatgcagacggtaagagaaatgcaggggataaccaacctgagaaaggaggcaaggtgatgatcgagcgcaaagaaaaatcgccctggccgcggcaacgacacatgggcgacgtaactatgggatttccgtctatagtttattccgatcgggccccagatgtcaagaggctgcgcacgcgagatgagctcgaagagcagcgggagaatctcgaatacgagttgtcccagcttgatgcactgcaaagcttacttgagggcagtagcatcgaggcgaccgcacggtgtatcgactaccgcgcgtgcgtggctgcggcagaagaagagttgaatgaagtccggcagcggcttgcccgctatgaggcgcaggatagggaagagacaaaggcagatgaagcggagcgggaggcagagtatcggagggctgtattgtgagattaacgcgactggtcagtactgttgggatgagccgtgaggactggctcaaataccgacgtatgggcataggcggcagtgatgcggcaaccatcgtcgggctaaacccatatagcagcctatacacgctatgggcggataagacgggacgacttgcccccaaggaggataacgaggccatgcgccttgggcgcgatctggaggggtatatcgccagccgctggagcgagcacacgggcctgcggtgccgtaaggtcaacgcgattttacgcaaccccaagtacccctgggcgattgcagatccggaccggcttgtgattggagcggatgcaggcgtcgaatgtaagtctaccagcgtcctcaacctaagacactttcggcagggcgagtacaaccctcactactactacgtgcaatgcgtgcactatatggctatcacggaggcggagcgctggtatctgcctgtactagcccttggggaccggcaacagcccatgcattattttgaaatcaagcgggatgaggccgagatcaaggcgctgatggatgcggagcgcgactattgggagcgatatgtggttgccgacgtcgcgccgtccgtcgatggatccgccagtactgatgccacaatcatatcgatattcggtggtgtgacgtcagacgaagaagtgccggttaaaggggatacacttgaccgatatatggcgctcaaggcgcagatcagcgagctagagacgcaaaaacgtcaggtggagcaagagatcaagctaacgctgggcaggagcgaaagaggcatctgcgagcgatacagggtgagctggccggaagtcaagcgcacctcgtttgaccacaaggctttccacgcggcgcatccaggcattatggactttgacgactattacaagattacgaccagccggcgcttttcggtgcaggagattaaataagaggaggatatataacatgccaggaatgattcaaaaagcagttaatgatcaacaactccgatctgggcagaccggagggaagttgacggtcaaccaactcatgaacaatatccttgacgcagaggggatgcgcaagcgatttgatgacttgttaggcaagcgcgccccgcagtttgtgtctgccattgtatcgctggtcaactcgacccctcagttacaggaggccttttatgagagccccatgacagtgatccagtcagcacttaaggccgcgacgtttgacctgccgatagacccgggcctgggcttcgcctatctggtgcccttccgcaataaacaggctgacggcagccggaagatggagtgcacttttatccttgggtataagggcatgcagcagctggcactgcggaccggagcatataagaccctgaatgttttggacatccgggcgggcgagttgaaatcatataaccgcctgactgaggaaatagagcttgaatttatcgaggatgaagccgagcgggaagcagccgaaatcattggctacgtcggctattttaagctcatcaatggaactgaaaagaccatctacatgagtatgcagcagatcgccgcccatgagcaaaagcaccgcaaaggccaatatatgggcaagggctggaaggacgattatcaggccatgtgcgctaagacggttatgcggcgactgatcggcaagtgggggctaatgagcatcaattaccaaaccgccaaccaacaggttgttgctgcggcagatgctattgctactggccggtttgacgatgaggacgacgcaatcatagcgcccgagtatgaggtagtggatgatacgggcgaaccggccgcagaggcccaggacgggcagcagacgataggctgaaatgaagagaggtaacgggtatgccgaacaggattataaaagaatcaatctgcaagagtgatacgatagatagccttacggcgcaagaagaggtgttcttctatcgcctcttggtgaattgtgacgactatgggaggttttcggcagaccctgatcttcttgcatcctacctttttccgcgtaagcggtcgttaaaatcctcatcggttaagaaatggctcaacaaacttgtgtcttcggggcttgtgactgtgtatgaacatgacggcggagcttatctacaggtcacaacctgggccaaccatcaaagcatacgcaataaaaagagcaaatatccatcgccggacgccccggaaagtactgtgttgcaggctacggacacttgcaagcaattgaaatcaagtgattgcaaaagtccccgtattcggaatccaatccaatccgaatccgaatacaaatccgaatccgaatccgaaatagacgccggtgatgaagttaagcttatagaaggcagacagtcctcaagcggcggcgacgatcccggggataaagacccggatgatggccgggaagaacccggcaaagcggacgagcgcatggccgcagccgtaaaggagtgggagaactgcggctttggccccctgtcgggccgagccgcagaacacatagggcactggctggatgattacgggtttgagtggacgcttgaggccctacggcgtgcaggggaccggggaaagcgatctataggctatgtcaacggcatcttgcagcgctggcatgcggatggaggtatggataaccctaagccgccacccggaaagcagagcggcgggtataagcccatagctggcgagcagtacatccagcaggactatacggcggatcagctggacagcgtgatccgcaagctggagtaggaggaggcgaaggacatgattgagtttgttttgccgatgaaggtcaccggagaatacgggcttaacaagctatacgccggggtgcattggtcaaagcgcaagcggcaagcagagtacatgcacggatttgtgcgcggcgaactacaccggcagcggataaggcgtcggatattttacagccctgtgcggctgaccttgtactacaatgaccggctggactgtaccaaccatggttacctcacaaagctgattgaggacgcgcttaaaggctattttatccaggacgacagccgaaaatacgtcaaagcggtgacccaagagttttgggacggggacggtatcagggttaggattgaggaggcatagcaatggacgataggatcgcgctgatgcacaaactgcacggcaaggcccatgggtacaaatgcgcagactgctgtaatctgcagaccgagttctacggtcgggcgcactataagtgcgtcgcatacgggatgacccggcctgcattagccgattgggataaaggccaaaccgcctgcgggttgtacggcaagccgtttgaccccaacacgatgcgcccggctattgaggccaagaagcgcatgcagcggcaggttgacacaagtccgattgacgggcagatcagtatagcggatatgggggtgtagctggtgtatcagtaccgtaaggtaacgccggatttgatcatgacctactggcgggctgggtggaccaatgaacggatcgcagaacgattgggcattaaagagagcgagatcatacgggccattaaggtctacaggcctgcagcgggcgcaaatggccgggtatcatcattcatcggcctttcggagtctgataagcaaaagttcgacgacctatatatggccgggataaagtacgaggacctagccaatgagtttggcatcgggatagacacagtcgcaaattgggcaaggctactggaactcccgtcaagaggcaagaaaattagggggaagagcatgcggcaaaagaaaagcatgagcctttccgaggttttaaaattggcccgcgaagccgacatgagctatgggaagtatgtggcaacgatgggagaaaggggagagtaggggatgaaaaagaaacagtatgcgagtcctgatgtgtatgaggcgaaacttgcacgtgtgatggagcggatgggtgcagaggattatagctacaactgggatcgccatatggcgtgggtggagttcaagcgcaaggggcagctttttagatttgaccacagtgttgataaggcgagagcaaacggctttgaaatgacatacggcagcgacgtattcgctcaattggttattacacttgaggacttatcccgcatggccgagcgaggtatttacgagctacaaacatggctcgaagggatgcgtttcttgccgccgccggtagaagtcccggcttgtctgcgcactttaggattcgatcgtgtcccgacagacccagaggaagtcaaggcaaggtttaagacgcttgcaaagcaggcgcacccggacatgggcggtagcgaggactcttttatacgcttgcaacaggcggcgaaagaggccatagagattgcagcaaagggagagtaagagatgcaaacagctacaaaatcggaggaatcggaggccttaaaaaaggcgctgcgcgccgaacggctgcgctttgcgcacctactggcggacgctgcaggcatggtgaagcgcggggaaaggccatgccggtcctgcgacggccacggatgcgcggggtgcgtagatgatgaccattgggtgtggataggccaagagctgtgatagccgggtggattgcttatggttgcttttgcaccgtacactcctttgccggcttatcctcgcgcaggcccttgaacacaggttggcgcatggaaccattggctagtagctccatgtacctgacagtgcagaccaagacgggaggcagccagatggcctggtcgttgccatggccggatggataatccagcggtgcggcggcagcaggctgaaggcgccgaatgcgggcaaattctggaccggatacacctaaggtcacatgccctttatagaccagctcgccgctgtcgtattgccccagcacaagactgtacatgtggttatcctttggaatccagccgcagaccacgaaatcatcatccagcaggtttttgatcttgatccaatcgtgggtgcgcttgccggggatatagatgctgtcgcgttgtttggccacgatgccttcgaggtcttgggacttggcgagcgcatagaacgcgacaccgtcgcgctcgatataccgggaaacggcgagacggtcactttccttacgcacggcttttttcaggcgctctttacgttccatgagcggcaaacgggtcagatcttcatcgccggaaaagaggatatcaaaggcggtaaagctaaccggcagttttccggcggtcagcttgatcttaaaggggtcgctcatcagagaacggcgctgaatctcggagaaatccggcacgccgtcccggatgactaccaattcgccgtccaggatgcagcgaccgcgcacctgcttgttgatgctagccagctcgggataggtagcggatacgttaaggtgccgcttgttgcgcagctctacgccgctatcatccagataaaccaagcaacgcacgccgtccagcttcaactcgtaaatgtattcgtctgagtcaaaggcttcgccggaggttccaatcaacatgggggtaatattgcgctgaccgaacctaatcatttggctgccgctttcctgcgcgtgcgcttcttgggtttatccccgtcctgctgctccaggctggctttaagcgcatccatcaggctgatgacattaccgccagtttcgggttgcggcgcggtgatctccttgccttcgatcttctgcgcgatggcggcgcgcagccgctcggtgtattcgtctttgtaatcgctgggctcgaaaggcttgaccatggagccgatcagggtcttggctacctgcagctcatcggcattgaccggagcctgggtataggccttgggcatgggtttgatctcatcctggtaaaagagcgtctcggccagcatgccgttgctggtgggcagcagggcgatcagcgtttcattgtcccgtatgaccgttcgggctatggccaccttgccttcctccagcatagcggtgcgaagcagctcaaaagccttatccccgccggcgtcggggatgatgtaataggacttttcgtagtagatagggtcaatctcttccacctgcgcaaaatgcagaatctggatgcttttatccttctcggtcttgatggcctcgaagtccgcatcctccagaatcacatactgatccttttcgtgttcgtagcctttgacgatgtcctccggtttgacctcggtaccgtcgtccagcacctttttatagcggatccgctggtgggtctggcggtgtaattgattaaagctcaccttattgtcgcgggttgcggtataaaagctgacggggatgtggaccagcccgaagctgatcgcccctttatgagatacagatgccatgctatcaccttttcgtttttgcttagtatgaccagcatgatataaaacttgtatgccaggagaatcactgatgactaaaaaagagctttcgcagctttattatttaaaccgcgagatcgagcgggacaagcgacggctggaggaactggaagcgctggcggccggctgcacacagcagattaccggaatgccgcatgccccgggcgtagcagataaaattgggaactgcgcggcagaaatcgcggatctgcgaggaatcattgacgcaaacattcaaaaatgctggtatgagctgaaccggctgaatcgctttattcaatccattgatgatagccagatgcgccagatcatgacgctgcgctacatcaacggtttgagctggcggcaggtggcgatgagtatcggtggggggaatacggaggatggggtaagaatgatgcacaacagatttttggacgaaagctaaacttgttcggtttgttcggttgtgttgttgtacactactaccatgggcaaggcatccgagagggtgccttttctcttttcctcctttctttctttggcgggccttcgggcgggataatgattgcactgtagatagggcaggtgggggccggggtgcaaatacgaggtgatgattgatgtggctgtcgagctgaccgccagacaggcggcatttgtggatcgatatatcgagctgggacaagcggagcctgcggccgtaaaggcggggtactcgccacgctgggctagaggcaatgcccataagctgctaaaggatgagcgcatcaaggcggctattgccgcgcggatggagcaactggccagcgagcggatcgccagcgcccaggaggtgctggaatacctgagtcgtgtgcttcgcggcgaggaggccgaggaggtcgtggttatggagggcttaggcatgggtgagagccgggtgaagaagttggacaaggatatcggcgctaaagaccgtatccgcgctgccgaattactaggcaagcgctatgcgctctttgtagatcacgtggcgctttccgatgagcgccccaacatcattgacgatataggcggagagagcgatggctgatgtaaggctatcgtcgctgatcgccccgccgttttggtccgtccatcaggatgtacttgccaaccggcatacgcactactggcttaaaggcggccgcggcagcacaaagtcgtcttacatcagtctggagatcgtgctgggtataatgcgcaatccggacgcaaacgcggtggtttaccgcaaagttgcggccacattaaaggaatcggtgtacgcgcagctggtgtgggcgatcaatgcactgggcgttgctggctattggcgctgcggtgtcaaccctatggagctaacatataaacccacgggccaaaagattttattccgcggcgccgacgaccccaacaagagcaagtccatcaagctggccaagggatactttaagtatctctggtatgaggagctcaccgaattcgccagcatggaggatgtgcgaaccatcaatcaatccatcatccgaggcggcgcccgggtggtggttttttatagctacaacccgcccaagagcgcccaaaactggaccaatgcagagtgcctgatccagcggaccgaccggctggtgcaccacagcacctacctggatgtgccgcgggcctggctgggcgaaccgtttatcctggaggcggaggcgctgcgccagaccaatgaggcggcgtaccgacacgcttacctgggcgaggtgacgggcaccggcgggcaggtgtttgacaatctgcgcatcgaggtgatcccggacgacctgcgccagagctttgaccgctttgccaacggcttagactttggctttgcggtagacccggacgcatttttgcggatgcactacacgccgcatacccgcacgctttatctgctggatgagtattacgccacccacaacagcatggatacgttggcggagcggattatcgggctgtctggccgagagctagccacggcggatagcgaggatccgcggatgatcgccgagctgcgtacccgtggggtgaatatcaccggcgctaaaaagggccctgggagcgtggatcatggcatgcgctggctgcaggagcttggggccatcgtgatcgaccccgcgcgctgccccaacgcggcgcgggaattcagcggctacgaatatgcccgagataagtacggtaatttccgggccgattacccggacgcggacaaccacaccatagacgctgcgcgttacggcaccgagagcctgcgcgcgagccgccagctagggaccatcagcaagagtttgctgggactgtgagggatgacatgtatcgcatgagcaaggacgcggagctgacccccgcgatgatcaaggcatatattgacgcatgggcgccggagcgccgacgactgaaccgtttgtatgagtattacgtgggcaagcacgatatcctgcagcgcagctccagcgacccggcaaaacccaataaccgcatcgtcaacccgtatccatcctatatcgtggacgtgtatacgggatattttatgggcgagccagtgacttacgcctgtgacgacgaggcgctgaaagacgcattggaccagatcaacagctacaacgatgaagcggccgaggacgcggagctggccaaagacgcgggcatctttgggcgggctgtggagctggtctatacggatgaggacgcaaagctgcgcttccgcaaattgccaccgcaggattgtatcccgatctatgacgatacgctggaggcggacctactctacctgatacggttgtatgaggagacggatatcctgcgcagcacggtcaggcgcttcgcggaggtctacagccgggatggcgtcaagacctatcggtgcgatggcgcagttgtgccggtcggaggcgcggcgcgggagcaccagtttggcatggtgcccgtggtgatatatgataacaacgaggagcagctgggtgactttgagcccgtcctgaccttgattgacgcctacgacaagatccagagcgacagcgtcaatgacatggagtatttctccgacgcctatctggtgctccaaggcctgcaggggacagagccaaacgatatcgctgccatgaagcgcaaccgggtgatgctgctgccagagcagggggccagcgcccagtggttggttaaggacatcaacgacacctacgtcgagaacctcaagacccgcatcgaccagagcatccataagtttagcaagtgcccggctatgacggatgaggactttgcggccaacgccagcggcgtggccatgaagtacaagctgatggggttggaaacggccaccagcaagaaagagcgcgcatttaagaagggcttgcagcgccgcatcgagctgctgacggcggtgcttaacctgcagggcggaaactacgactaccgcagtgtggagatgacctttacccgcaatattcccgccaacctggtggagatggcggatgtgatcaccaaagtgggcaacctgctcagccaggagacccagatcgggatgctgcccatcgatgtagaccccaaaaaagaactggagaagcgccagcaggaagacgaggaaaacctgggcatgaccttcaccgacgcctatgggccggaagtgagcaaggatggcgcctatgagatcaatggcttccagtagcgattactggcgcaggcgtgcactggccgacgaggaaaaggtccaacgggtagccggacggatgttgcgggaacagtgcaaggtttaccggcaggcctacgccgacatcgagcgggcactggacgcgctctacacgcaggcggtagaccagggcgccgaaagcctgacccgtacgcagctgtggcagtacagcaagtacaagcagctcaaagccgtgctgcaggaacagacgggggagatcgccaaaggccagattacggccatcgagagcacgctggagcgcatattcaaggacacgattggagcagcctcaaaagcctttgccgggcaggatatccgctttaatggcgtatcggatgcccaggtcaagcgcctgattaagagcaattggagcggggagagttttagcaagcgggtttggcgcaatacccgggagattgcccgcagggtggaaaaggatgtcaccgatatgatggtactgggcaagtcgcccagtgccgtgaagcagcagctgatgcacgattacaacgtgggatttagggctgcagaccgtctggtacgcaccgaggccagccatgcctataacagcgctgctttggagagctacaaggctgcaggggtaacacaggtggaggtacttattaaaccgagcgaagaattatgctccgactgctctagcctagctggcgtctacgatatcgacaaggtacctcgtctgcccgtccatccgcattgccggtgtacatacgcaccggtggtggatttagaagcggaaattagggcgcttgaggcgaaaaaagctgcggaaaagggtataatagagatgtatcgggcgagcacgccggtgatcggcggggcaaagaatgttcagccacagaccatcgtccgcttgcaagaggctaggggtaaggtattggatgactttccagcgttggatgcgctgacgcgcgaatggtcgtttgagaagttagaggacggtacgctggcggccaaccgatttagaattaacgcccagacaggcgaggtggttagcaccatggcctttgatgtgggggcatttggggacgaaaagcagctgctaaggatattggcccaagagtataagagcggtgcaagctatgaaaccaagagtatagagagcttgattgcgcatgagatgggtcacgctgcgcacaacgcactggcgcttaaccgcgtcgggtatattgagggtaaatcattgacacggcagcagatggagatgttcaaagttgagcgtgagcaactaaggcaagatatttacattgcggcttttgcaaacgaatcttatgatgagattgtggataatattttggcccagctcggacaaagtgcgcttaatgccaccgagttgattgcgcagagctttggaaattgctactacggggaaaataagtcggcaatagcactgtcaatagtaaaattttttatgaaggagttgaaatagaatgtaccgcattggaaacccgtatgcctatgccgcaggatattatctgattttgccggataatagcatctatttcaagccggagacccctcctgaaatcaaggagcgttttaccaaagactgggaagcgcacctaaaagaggtcgaggagaagcataggcaaggggacttttctgaataaaaaggggggggatacaacgtggataatttcggtgtgatttataagatactccgggcgttggagcaatttatggatgcggagaagtttgatttttcgctgattcaggcgggcgcattaggtgtatctgaagcgcggtgggctaggctcatgggaatgcttatcgagaatggatatatttgtggcgtcagagcaactgtttatgacggcaaaagtgtgccgattatcacaccggcaatcccgagtatcacgataaaagggcttggatatttgtgtgaaaacccaattatgcagaaatttacactggataggaaaaatgattaaggattctgttccaggcctataagtaaccagatgctaaaagcactgtagcccagagctatggtgcctttttcatacccaattttagccgacgggcgttaaacggtgatggaggtaacaaaaatgctttggaaattgatgcacatggccccgtatcgggaggctgacagcggcagcaatgccggtaccaatccgggcgccggagatgagggcgcacagggcggcaaccccgccgcagatggaaaggcccaggagggcaagggggaggatgcgcgcacctttacccaggaggatctggaccgtattatctctgacaggctgaaaaaggcggaggcaaagtggcgaaaggctgccgaggtacagaccagcgaggcggctcggctggccacgctgtccgcagaggagcgcaaggccgaagagtttaggctccagcaggagaaatttgctgcagagaaggccgcatttgaagcccagcgcatggagatggaggctaccaaactgttggctgcggataagctgccggtggagtttgccggcatgcttaaggccgcaacggcggaggatacgcaggccaacatcaagacctttgccgaggctttccgggcggcggtcgcagccgccgtcaatgaccggctcaaggcgcctacgcctaaggcgggctccacatcccccagtgggggtagcgcctccgcgtttatgactgaggtgcgcaaaattcaggcaaaaagacgttaaaaaggagagatgaataatggcagatacgcagtacctaaaggacaatctggccggctttgtgccggtcgagaaatctactgaaattatcaaagacgtggtgagggggtcctccatcctgcggcttgcaaaggtcgagcagatggagagcgataccaaggagatccccgtcatgactgacggacccggcgcctactgggtgggtgaaacggagcggatccagacctccaaggcaacctggattttcccgaagattgaggccaagaagctggccgtcatcatcccggtgacgcgtgagaagctgaacgattcgattatcgacgtgtttggcgaactacaaccctatatcgcagaggcttttcacacctctctggacgcagcggctctgtttggtaacgattcgcccttcgccaagagcctctacgacgctgcggaagcggcggggaatatcgtaacccgcggaagcgacgctctggatctggatatctcggacgcaatggctacggtggaggctggcggctatgatgtggacggctttgccgcacattatggggttaaaaatgccctgcgcaagctgcgcgacgccaacggcaatgcgctgtatgtgcccggggttgatcagtctaatctttatgagaatcccatcgagtttgtacgcaacggcggctgggataaagaccgcgcggatatcatcggcggcgcctggcagtacgctattgtgggtatccgccagggcattgagtacgaaatcctgaaagaggccaccctgcagaccgtgacgatgccggatggcaagcctctctccctggcggagaacgacatggttgctattaaagccaccatgcgcgtgggcttcctgccggtcaaagacgaagcgttctgtgtagtcgctccggcaggcgcgacgctgggtgagctgacggtgacgtccgtggcgggtaccaacagcggtgacactaaggtgacggtcacaccggaactgaccggtggaaatagctataagtataaggttggggccaatccttcgctgccgaagtacgaccagaagctaaccaccggttggacggcctgggacggtacggctgacattaccgcggccactggccagaagatcgttgtggcggaggtaaccgccggcaatgaagcgcggaaggctggctcggctacggttactgccaaggaataattggccgagaagggagggcgggaaaccgcccttttcttattacgcggaggtgatgcggattggacgtagtagacatggcaaatacgctgatcggggatggcgctgatgaagcaaggatcaacgtcctggcggaaatcgtaaccgcggaggcctgcgcctactgcaactgcgacgccatgccgccggaggccaacgggacgctggcgcagatggtggtgcaaaagtataaccggcaaggcagcgagggcgcggcaagcgagagctacagcggcgtatcggagagctatatcgacggctatccggcggagatccgcagcgcccttagccgctggcggcggatggtggtggtgtgatgatcacaaggcggatgcagccggccactttgctggtcaaggccgtaacggcagacgtgtacggcagcaaggaggcgtggcgggaggacggtacgatcacgatcgccgtctcgctgctaaacggcagcacccaactgagcaataccgcattgacggtggatgccacccaccttggccttacgcctcgccgggggctgagcgtggttcacgccatcagcctgggcggagaaacatatgcgatagactacgtgtgcgacgatggccctctctcgcaggtatggctgcacaggatcaagggggtggcggcagatggcggatgaggtgttgtttatctcggcgctgggcagcgacatatctggcgcctttgaggcggtgaaggagcagacgatccaagccgaggtgggcgccatgaccaaggcctgtctggctgttgagcgggatgccaaagttaactgcccggtggataccggcctgacgcgggacagcatcaccagccaggtggagcgggacggcgacgaggtggtggggtatgtaggcagcaatgccgagcaggctccctatatccaccagggcacgggcatctatgccaaagacggcaatgggcgcaaggaagtcccatgggtgtatcgggatgcaaaaggcgaatttcacagcaccaagggtcaaaagccccggccgtttgttcaggacgccatcgacaccaatcgtgatacgatcctgcggtactttgctgccgtattgggaggtggcggcgcatgatcctggcacaggtattaacgctgctgcgcggcgatgagcagttgatggcactggtggctggcatcgaaccgcaccatacgggcgatccggcgcacaaccagatcgtgtacagctttagccccttgacggacgataaggcggtgcggacggaccggctggagatccacatcatcgcccagagcgtcgcggagctggaagcgatagaccaagccgtgcggcgtatcctgctgacctttggggatagccccctggcgggggatgtgctgcaggtggaactaaatggcggcggtgatatggaggatctgggaacagacacctatcaccgcatcgcctattacattttgacgagtaggagcgtgatatagcatggatacggagcagatcattttaggcagcggcgacctgtatatgaccgcttatgacggcactgacctgccggaggatgcgacgctggaggtggagagcaaccgggtgggcgctatccagggcggcgccacactggagtataagcccacggagtatgaacccaaagacgacacggggaaggtctacgagcggtttgttaccagcgaggagaccaccttaaagagtggcgtaatgacctggaatgccgaaaccctcaaagggctgacggctcgcagcacttataccgacgatccgaccaagaaggtgcgcacccttaagatcggcggcatcggcgcgcgacccatggccaagaatgtggtgcgatttgtccataccaaggcggacggccataaatttaggatcaccatcgtgggtacggcctccaacggctttagcttggcgtttgccccggacaaggaaacggtgatcgacgcggagttcaaagcgctggcacatggcgcggataacacgcaagtcatcatctcggaggagtatggcgaccctgaggtgggcggctaaaaacggcagctgaatgtgggagagggcaacctctcccttttattttgtaggaggaaacgttgatgggaaaagtattggacctgcggcagtatcaggaggatacactggacatcacgatgctagatggcagtgtggtgcgtgtgaaaaagcctacccaaaagctggtcattaagatcatggcatttcaaggcctggccgaggatacggcgcaggataaagtgttggcggcattggatgacagcgtgttggcgatcctaagtaacaacgcggacggggttaaagtacccaaagccatggtgacggggctggaagtcgtacacaagctggccatcttgcgggcatatacggattttatccagggcgtgcaatctgacccaaactgattccgccgtctatccccggcgaaggtgaggacggcgacattgaattgatgcagggtatccggcgggtgatgcagtacgggaacctcagctacgagcaggcgctggatttgcctacggatgtttttttgctgatggcgaaaaaccactatgtggatgagctgcagcagacagaggatggccgagagtacctggaaaaatgcaagcgattaaggataacggaaatcgacgaacaggcgctgagaagccggtatgacttctagggcgctttttattaggtgggtgatgaaatggcggcgtcattagacctgggcactttacgggtgcaggtggccgtacaaaacgatgaccggggctgggcagcggccaagcagagtggggcggatctggagaaagccacccgggtcaacatgcaaaaagtgggggagaacatctccaaggtaggctccgggatgaccaagtggctgaccttacccatggcggcagcggccacagcctgtgtaaagtacgcctctgatatgaccgagaccagcggcaagatcggcgtcgtatttgcggagaataccgacgcagtgatgaagtggtcagaggcctccattaaccagatgggccttgcacagcagaccgcgctggatatggcggcgtcctacggcgacttgggcagcgccatgggcatcaccaacgacaaaaacatggagatgtccacgtcgctggtacagctggctgccgatatggccagttttaagaacatatcggtggatcgggcggcggtagcgctgaacggcatctacaccggcgagaccgagagcctcaaggccatgggcgtggtgatgacggaagctaacctggaacaatacgccatgaaccagggcatcgagaagaacattaaggatatgagccagcaggaactggtcatgctgcgctacaactacgtgctggaccagaccaccaatgcccagggcgactttgcccgcaccggagacagcaccgccaaccagatgcgtaaggccaaagagacccttaagcagctggctacaacgctgggccagcagctgatccccgtggtcaaccgcgtgctgacggcgctcaataacatgctcagcggactgctgaatatggatgaggggacgaaaaagcttgtaattacgattggcgcgatggtcgcggctatcggtcctgcgctacagatgacgggaaaaatcataactgcagtggataccatacgcgataagatcgaaaatcttgaccgcgttactacaaaatcggtgggtattatcggggctgtaacgttggcggttacggtgttggtgggggtggtatcgtctgcggtatcccagtatagagaactgaccgaagatgcaatagaacttaacgaggctactcagaagtctgttgataatattaatgccgccgaaaaggcctatgaggataacacgacggcggcatacgcgtccgcagaaatggcaaagcagtatgtggataggctatcggatctcgaggagcaaagcagcctaacgcgtggcgaacaggccgaatataaagttatcgtcgaacggcttgcagaactatatccgcaacttaatcttgagatcgatgagcagactggattgcttaagaatggtgcggacgctatccgagatcaaatatcggccatgaagcaaaaagcaatctacgaggccgcagaagaacgatacaaggcggtaatcaaggaatccacagacctgctttatgctcaaaaaaaggctcaggtcgagcttgaaatgaaaaccgacgagagcaataaagccaaacagcggcaggctcaaattgaacgagaatacaaaaagcttaccggtgaatcaataacagcactaaaaacattaagtgatgacgccatccggcagcggtataaggagagcgatgccgcaagagcgttgcttgtagaataccgagacctgaatataacgattgatcacaacgcggtatccatcggtgcgcttaatcaggcgctggacagtaacaccgccgcccagaagaacgcagagcaaaatgttgcggtcgctgatgaaacactgcaacgtcttggggcaaccctcgatagcgcggcaacatccgcggacggagcctcaggagcagtagacgatctcggggcatctatggaggcgtcagagcctaagacagtagactatacagatacgataatcaacaattttgaccggctagacgacgccgttgagatcacgcttgcagaggccaccgcaaacctgcagaaaaatgccgaagatacccaggtatggatgggcaacctgcagacgctgatcgataaaggtgttgatgaaggcgttgtccaaaagctatacgagatggggcctgcgtatcgtggcgttgttgcggatttggttacggctaatgaggaagatatggctgcctttgtggatgctatggggcggagcgggcaggtgggtggcgagcgctttagctctaacgtatctaccggtatacagtccgggcagtctgccgtaaattctgacgccaaagaaaccgttaagggtgcaatatcggccggagaggaggcctcaaaggacgcgcagtatgtaggcgttaacattggtgcgggtattggtaacggtataagctcgcaatcggagatcattgccagcattattcgtagcgcggtaaggcgtgccatagcagcagcgagggaagaagccgacatgcactcaccgtcccggaaaatgcgagacctagttggcaaaccgttggcgcagggggtaactgtgggatgggacgacgaaatccagaatacactgcgcacggttaagtctggcatcggcaacttgatctctggggccatgccgcccattggccatattcccggcggtaagacgacgggaacagccacggtggccaggactgcgcctacagttaaccagacgataaactttactgcccgcgagatgacgccttatgaagaaatggtgcgggtgcgcaatctgtccaaagcgctggcgcagggggtgagataatggaactgctgagctaccgcaacccggacaatcaggtgatcgagatcggttatggcggggattatcagctgcatgagtggtacggcatgggcgccagcgaggtgctgcccgttactgcgcgggggtaccggcagcagggctatacctatcaaggtgcaacgctgggtatgcggattattaccgtcaatatccgatatgtgggagagtattaccggcataaggatatgatcgaccggatgttcaatccgctgcttggcccgggcgtgctgacctataccaatgactttgccagccgcagcatcaccgtgctgcccacgctaccggctacgccactgacccgggacggctaccatgtggtgacggtagagctaacggcctacgatccatttttctatgacccggccgaaaatgctcttaagctgggggactaccggggcggtttgaccttccccatgaagtttgaccctaccatccgttttgcacaaaagggcgatatggccaatatcgagatcgtgggggatgtggaatcccccctgcgggcggagttccgcggacctgcggttaagcccaaactgaccaacgtgtccaccggggagtttatcgaggtggataccacgctggcggccggcgataccctctggatcaataccgcctatggcaataagacggttatcatccaccgggcggatggcacagaagaaaatgcctataacctgatcacggtggattcatcctttatgcagctgcagcgcgggcaaaaccgcttggaattcacctctgagggaagcggtgacgcgggcactgaggtttatttgtactggcgcaaccgatatattggcgcgtagggcttgccccctccccaaaatgtgggatataatggaaatataagaggaggggataaaatggtagcaaaagcaggatttgtagcaaaggtactttgggttatctcgattatagtgattattggtggcattgtaatgggtggaattttggggaattcggttccggcgctcgttccattgtatgagggcagtgattacatgaaaaacacctttaattggggactgtgctgtggaatcgcaggcgctggtatcatttccggtataacacttatgggcttttcggttgtgatagaattgttgctcggcatctataagaaaaacaatacagaggaatagacgttattacgtaagaggcaccccatgagggtgcctttttcatacccatttttaggaggtgatgccatttggacatctactgctacaagcacgctgcggccgggcttaccctggtaggcgtggtggatgactttatcagctttaattttacgcggaggtatgccgacatcggcgagtggcagctggtgctggacggggagagcctaaatgcccagcgtgtgcgcgatgcagactttatccgcgcggggcagggtgtggccgggctggtgcagtccattgaggagggcaagggggagcagcggaccttgacgctgactggtgtggagcttaaggcgctggccaaccgacgcattgtggagccgcccgcggggcaggcctacctgcattacgcacgtactccgccggagaccgtgatcgccgggctgctccagacccagctggtcaccccggagaatgccgaccgcggtatcgcccacatatctgtggcggactatgcggccacggggtacccggtaacctatgacgggcgctttcagactgttggggcggaaattatgacgctggccaatacctacggcgtaggctggtacgcggatatcgaggacggggctgacatcgtctaccatatttaccgtggcttagaccggtcagaggggcaaagcatcaatgaccggctggtgatctccgagagccgggacagtctgcaggcatcgacctacggctacacgacggagatccccaactggatactggtggcggggcaaggcgagggggtagatcgggagctggtacgcatcggcacctcctccgggctgactcgtagcgagctttaccgggacgcgcgggacgtggcccagggggagacggagctgctcacccagcgaggcaatgagacgctggccagctttggggatggagccagctacacggcggagttctccgcggcgtttgcgcagcgctaccgcttggaatacgacctgggggacatctgtaccattaaggatgacgcgctgccggacgggcagatggacatccggctgacggccattaccgaggtctatgagggcgacgcactcatcctgtcggtggagtttggcaacgccaaagattctctggccgacgccatcaaccagaccacggcaggcacccaagggctgctgcgggcggaatccaacgtagccgagcgggtggcggcactcgaaaacccggaaaggcaatttttagattttacgttcttgaatgggtggaaaaacagctccagcgggaccaacgatctgatcatctggaaggatccatggggctacgtgcacatggctgggtctatttacgggggtagcgaaagcaaagtgttggagctccccgtgggctaccgtacagagcgtacctacgccgcgtttgtacgcaacgcgtctgaaggcacgataaccgacgcacacctgtttatcacaggggcggatatgcgtattcttaccgacagcccgctgagcaatgtgtacacgatcagcgcctattattacggcgtataggaggacaatatggttttagaggattatggcttttttgactattcggccagcgaggccggtacctacgaatacaccagcaaggagtataccggtgcgctgcgctacctggtgggggacggtatcgtccacaatgacggtagcgccatggcgccctccgccaacggactggtggtcacggtcggtacaggcatcggttggctggcggggcgttacggacgcaataaggcggccaagacctttagtctggatgcggcaggggctgggctcaagcgcattgaccggatcgtactgcgagcggacgccgtggcccgtaccgtatcgctggaagtcaagcagggcactgcggccgctacgccggtaccccctgcactcagcaagacggacgatctgtacgagattccgatctgcagcgtcgcggttaccggcggcagcagcgcgactacgctgaccgacgagcgcacgctgctctacacccccagtgaggcggtggccaagatgcaggcgatcacctctggcacggactatgtctacgcggtctacgcgtaaaaggcggtgagcagatggcgagtgtagaaatatatgcttcctgggccaagtacaggcccaaagccgcccgatgggatgggccgtataacggcagcgtcatggccggcaacaacgccagcggcggcgtatacagggccctgtggtatttccccacagggtctttgaattatgacaacattaattccatcaccttttatgtgacccgacgggatagctattccagtaagaccctgaaggtctacgtggcctccagctataattctgacggatcggccaacgtggcggcaaccatcggtacggtaacgcttgagagcggcggaggctggcaggccattacggtgccttccagcgcgtttgacgcactcaagcgctatggctatatctacatgcacaacgataccaccaacaacacctacgtggaactgtcgccaacggccagcgtggtgatcgattacacggattcggtggcgccgaacccgcccacctggttatcggtatcccctacggccgtcgagcccaaccgggccacgaccgtaacggtaagctggggcggagcatctacctcgctgggcgagattactggatacaacgtggattggaaccccggaggtcagggctggaaccggggcgagtccaaccacacgagcaccacctggcaggacagctggggggactggccacgggggatgcggattggctaccgggtgcaggcgatcaacagctttggtcgggtatcgggcacaatcgaaaactgggatgcagccatcaacggtggtcctccggagccgggaaacctcaagtacaatggcgtgcggccgcatggctcttactattcgaccagccccgtcacgctgtcctgggacgcggtgaccagcggcagcggtttagatcgctatgaggtgcggatgggggtatgggatggaagcaaatatgtgtttgataccccaatatcggcgggcaaagcgctgtcctatacctgggacctgacggtgtactcccgcggggcacgactggatccacaggtacgcgccgttgacagcctgggcgcggtatccagctgggcagccatcccggacgccaacgtgcggtacaatcaactgccagccgcgccggcggtcacctatccggtggcgggcagcacggtctacgcctataacccctatatctgcatgacgttgggcgcggagccggacgggcaggcacaaacggcagtgtgcgcgatcaaagggataagtacggacagttcaggtgacgcttacagccgcacgggcagctttgcggcggggagcaacctggtgctgcgatggccacatgcggtggaggggagtataacggctaccctgcgcggtaatgacggggtagaggacggtgcgaccgccacaagggcttttagggtgttggcgccggcatggaccgatccggtactgacgcccgggaaaactccggtcaaagctatccacgtactggagctgcggtctaagatcaacgatatgcgtgcggcctacggcttggagcgcgtgacctggacggatacgctttcagcgggcggcgggccggttaaagctgcgcacatcgcggagctgcgtacggccatggagcagatacgcggtcagatcaatagttttgataagtccaacgtcaacaacaaattgcccgcctatacctggaccgctggtctggagcgcaacaagcccatcaaggccgcgcatattgcggagctgcgcgcagccgtggagatgggcagcgacggcagcccgctggtctacggcgcccgctgggcagaagggtcgtccgccagcgccggggagcgggtgggggatgccgcaggcctggtagccaacgccggcgtggacgatgaagtggtgcaaaacgactttgacggggtgtacccctgggccgggcggcggcgctgcaacggctaccgggatagcgacggggaattcgtagtcaccgcctacgagggcgaggcgggctacagccagagcgacccggacaagctggtctacgtggaaacgcccctgttttactactttgacggggtgcaagacggctatgagcaaaagctgatctctatgctgccccagcccggctttttgcccagccccgcctgcctgaggcccgacggcagcctgcgcagccattcctacagcgccgcctatctgatggccctggaggacggcaaggccaccagccgcgcgggggcctttagcgcctacggcggattgaacggcatgatggacggcgcacgcaccctgggtgcgcagtacgcgctggaacggacggccacctggtacactgaaagcctgctgatgacggtggagttcgccaccaaagacctgcaaagcgtaatggccggggctaccagctacagctataacatcgctaaggcaaaggcggcggaaagcggcgccaaccgggtggcgctgggcaatgcctacaacgaggccgcccagtacgtggtgggggtgcccatcacgctaagccataccggaagcacgggggatgttaccgtggaaaaccgcagggtggccgccatcacccctaaaaacgcgagtgagacctacctgtactttgacggggaaccggtggatattacccaggagaccaccgtatttgtccgctcctgggagaacggggcagccgacggggtgcgggcgaccagcggctcgccggtgagtaaccagagcggcaagtacccctgcgtgtaccgggggcgggagaacccctacggcaacgcctggcaatttttgtgcgatgtgatgagccagcgcacggccagcgcgggggcctgggcgtacaacgcgtactacctgccggacgccacgcgctacagcagcggggcgttaacggaggactacgtaaaactggactatgcactctctgcggagagcggcaccatcgcagcgctggggtgcgacgggcgttacccctgggtgcgcctggcaacggcggtaggcggaggcaagaagaacggctacgcggatgcctatgccccgccggacgccacaacataccaggcggtgtgggcgtgcggggggatgtggaacggcgcggacgcggggccctgcgcgcacctgttgaacggctctaccacggccggtagttactacacccgcgcaaggttggggtaagtcaatattaaaatggaggttatatagtatgcagacaatcaaacgaggcagtaaaggcacggcagtcaaagagatgcagcggctactcatcgcggcagggtacagcctgcccaagtatggggcggatgggacgtttggcgcggaaagtgaaacggcgttacgcgatttccaggcggacaacggccttagtgtggacgggatttgcggccccaagacctgggcgacgctgcaagcgggtacggagccgggcacggagcacttcaagctcaaagagttcgcctgccgggatggttctgcggtgccgcgggagtactggggcaacgtgcgggcgctgatggcggaactggagaagatccgcgcggtgtggggcaagcccatcatcatcaacagcggctaccgcaccaaaacctacaaccagcagtgcggcggggccaaggccagccagcacctgaccgcaaacgccgtagatttcaacgtgcagggcgtggcgccctcggcggtgtacgccaagttggacgccatgtacccgaaccagggtctgggcaagtacgcgggctttacccatctggatcttcgcggctaccgggcgcggtggtagggggtgggcgtgctgatggatatgcaccagataaccagcgaaatcatggagatcaagaccatcgtagccgagctacaagcgcaggtcaagacgctgtttactcgatcggcggaggaccgcaaactgctggagagcgtacacagcctagccatctcggttgagcgtctggccggcgaaagccacgccatgcgcaaggatgtggataacctgcaacggacggtaagcaaaattgaggacaaaccggcggataactggcgcacgatcgtcaagtccgcactgagcggcatcgtgggcgctctggtgggcgcagcgatgctgctactgattaaatagggaggtatgttgaaatgaagaaagcgatgctatcgcagcccatgggcgggaaaacggacgcagagatcgtcgaaacgagggaacgcgcgataaaagagctgcacaggcttgggtatgaggtggtcaataccttgtttaccgatgattggtacagcaaaaagaatattgaagagagaggtgttgtacagataccgctttgtttcctcgcaaagtcccttgaaaatatgagcctgtgtcacgccgtttacttttgcgcgggatgggaggctgcgcgtggatgcaagattgagcatgaggccgccctcgcgtatgggctggaaatcatgtatgagggataaggaggtatatcatgactaagcaagattgggtacgtaagttgagcagccgcaagctgtgggtggccgtggccgggtttgtctccggcctgatcctcgcctttggcggcggcgaggacgtggccaccacggtatcgggctgcatcctacaaggtgcggcggtgctgggctacctgctggccgaggggcaggcggacgcggcgcggattgatgtggtggagattaaggacgagtaatacggcggaatgtacgagagaggccagggcgtttgccctggccttttttatttttaaagatactctatcttaagaatttggcttggagttatgggttctccggatccatcgtaacacgtattgcaatacgttgaatactgttcttcatgtatagaccaatataaaaactgtaatattggtttaattaaccatagacaatcatcgtttttggggacagttacaaattctattatcgctggcctagtcatttttttatataagttgaccaaaatactataattatcataaaaggcatattgaatatagtcttctacaatttcgggcatatcgatataattgtggaatctgaaaagatctggatggattacagcaatcctattcaaatttccgtatggtccccaatacatttctgtttgtattttattcagaaaaggacacccttttggattgaatttacttttttcaatgtcattcataaaggcgagagtattaatctgctcaattaattttggtacaattaaattagttggaagtattccttcgctcataatttttgaatcctgccgaagccttgttccgtggaaccagtgtatttgatctattttgcgtaaggctgtaatattgtgcacttctataattctctcaaataaatatgtgggaaaatctatacttatggctggattcttattttcatattgaatatgtatgtcatcagtcaggtaattcactagtcttttttcggaaattcctacaacttcagaaagagaacttgctgcagatttttcatctctacaaattagtgatgtcatagttgtattttcatctccttttttatattattacccaaataagggaataattcaaatataagatctattattcactaatcagaatacaatgagtgtttaccgcatttttaccgcaaaaggctcgaacttcggcatgcaaccgtatatggcaaaagcgctgtaaggcctgattttacagcatttatggacattcgcaaacatgcacgaacagccataattactgactcttaatcagggtgtccagggttcgagcccctggcggtccaccagctaaaaccccagtaaacagtagtgtttgctggggttttgctttatgttcctttggtgcgaaacacaagtgatcataaatatgcggggtgtttcgcaccgcatttttatcctttcaccctataaaaacggttgactaatagttgcacgctttgaaaaaataagctatattgtagatgttaattgtttcgacacaatttgttgcggtcgctctccgcaaggagagcgtggattgaaataaataccgtgcctggccttaacataggcttgcaggtcgctctccgcaaggagagcgtggattgaaatgcgcgtcagctctccctgctcctccagggccatcagtcgctctccgcaaggagagcgtggattgaaatttaatttgaggttttatgaggttatcggcgcctggtcgctctccgcaaggagagcgtggattgaaataatttttgctatggcaggacctttttgctctatagtcgctctccgcaaggagagcgtggattgaaataaagtgaggacgccatcgttctgctggagcaacgggtcgctctccgcaaggagagcgtggattgaaatgagcaggtcttgatacatccacacccggtcggagtcgctctccgcgaggagagcgtggattgaaattgccgggccaccgcgtaaccgttcatccggctggtctctccctgcggggagagggacggtcgaaatttttaaagtccgctaaaggatgtgttttagctcactaagcttgtatcttttagcagctttacatgaaagcggccgcgcctaagcgcggtcgcttttgtcgtatagtcgtggcacagaaaaaatgccataaatcgcaaagattattcataacgcaaggcttagctcccatacattggtcataggaaaagggggtagctttatgcggatatggatcttgacaaaaaagaatctggcgcgcgccggtgttatcgcgctagttgcactggtggcggtcggcgcgctgtattggggaggcgggcaagctgccagcagtgtatttggtacggctaaaaaagaactgcccgtttattcagtggagcaaagcgaaaagaagatcgccattagctttgacgccgcctggggcgacgaaaagaccagcgatatcctttcgatactggatgaataccaggcaaaatgcactttttttctcgtagggttttgggtagataaatatcctgaacacgtaaaggagatcgacgctgccggacacgagatcggcaatcactccaccaatcatccgcatatggcctcgctatccgaaggcgagatgcaatatgagattaaaactacatcggaaaaaattaccgctttgacaggcaaagaggtcaaggtattccgcccgccttttggcgaatacaacgattcattgatcaaggcgtgtaaaggtatggggattcaggccatacagtgggacgtagacagcttggattggaaggaacagggcgtgcagcccatggtagaccgggtgctgaataatgtaaaaccgggatctatcgtgctattccacaacaactcaaaatatattacagaagcgctgcctacgattttaaaaaccctcaaagaccagggatatgaaatcgtatcggtctctgagcttctgctgcccgaaccaaccacgatcgatacacagggcatgcagcattccgctgaacccacgcctacagccgcgccggaggaacagccggaagcgccgcagccggttgcggacgattcgccggccgcataaagatttgttcaatataccgctatcacggatagcggtatattttattagaaatataaattatgtagacaattatattgacatagcaacaatgtgttgatattatacaaatgtagacaaattataaataatgtggtgggtaaaagcatttttgctctgatgttcgctggagtttttaatgagcagacgcttgagcttttcagcttatatttaagaatccagaagagaggtgataaatgtagatacggggatcccggcgacgccagaccggagcggcagacggatttggctggcggagaagtagcccactgggacgtggctttgccgaaagaagttttgaaagaactagggggaaatattatgaagaaagtaaccataggcgcgctggggttagcgctgagcgcgataatactgcttgcggcctgcacgccgcaagcaacgcagggcagcaccgcttctgaatcctcatcggcgcaggaatcatccagtacctcagcagcaaatgcagacccggttaccttggaattttgggatatgttgtggggaccggatgcctatgcgaccgcagcggaagaactatctgcaaagtatacagacgtcgcgtctaatgttaccgtcaactacaccagcgtagcgtggagcaattggtttgagcagtactccactgcgttagcatccaatgccgcacctgatgtagccactggcggcggatacatgccctttcagtttgccgccaacgatgaaacggccgacctgaagtggatctatgacgagtggaaaaaggaaggcacgctggatgatttcatggaagatgactgcgagtactggaaatggaacgataagtacctggcgattccttcagacaaagatttccgtgtcatgatcattcgtaaggactggctggatgaagctgggctgtccatgcctaaaacctgggatgatgtatatgagacggctaaggtattcagcaaacgtggtgatggcatctatggcctgacccatggcgcgcataccggcggcactgggacggtatttatgcatttctttggcgccaactacggcgggatcctttatgataaagatggaaacgccaatattgataatgaaggtacttatgctattcgcgacttcctgttgaaactgcgtaatgaagggttgactccggagagtgttgccacccaaacgggcgatgacaatgttaagctgtttgcgtccggcaatgcgggcatgatcatcacaaacaacgaccaactcaaaacgatgtggcagtctggctttacgaaggatcaagtagccatcgtgccgccgctgacagcgcccaacggcaacagttattccgccgtcagccgcaatgggcagatgatcttcgaagcttccaaaaacaagcagacggccatggaattcctcaaatggttcaatgagaacagcgagatcctttggacggagggtcagcgcaataatatccctgcaaggatcagcttccagaaaaacgatatgtttaaggacgatttccgtgcagagacgattaaatcttatgcgccagtaggtcatcaatttatttggcccgtgacacatggcattccttccgcgtcttacgtagaaggccaaaagtatgatatgaaactcgttcagggcgcctatacgatgaatgagaatgactttaaagccttggtcaagagcttgaacgatgaattgcaggcgacgatcgacgatatggataaatagcccggagatcgtctgatccgttaaaacaaagtggaggcaaaaggcccatgacaggcgaaaggagaggtaaaatgtctttgaagttaggcatcatcggttatgggaatatggcgtcgggctggcacgcgaagatccccacacagctgccggaggtggacctggtggcggtgcacgacatcgacccggagcgggtggcggcggccagggcggacgggtaccgagcatacgacagcctgggggattttttaaaggatgaagaagtcaactttgtattggtggccacgcccaacgacttccacaagccgctggcgatagcggtgatggaggcggggaagaacgtgatggtggaaaagccggccacgctgagcgcccgggactgggaggagatgatggc
